(19) United States
(12) Patent Application Publication
(10) Pub. No.: US 2024/0067738 A1
(43) Pub. Date: Feb. 29, 2024

(54) ANTI-IL4 RECEPTOR ANTIBODIES FOR VETERINARY USE

(71) Applicant: Elanco US Inc., Greenfield, IN (US)

(72) Inventors: Shyr Jiann LI, Burlingame, CA (US); Lam NGUYEN, Burlingame, CA (US); Richard CHIN, Burlingame, CA (US); Hangjun ZHAN, Burlingame, CA (US); Qingyi CHU, Burlingame, CA (US)

(21) Appl. No.: 17/906,297

(22) PCT Filed: Mar. 17, 2021
(86) PCT No.: PCT/US2021/022706

§ 371 Date: Sep. 14, 2022

Related U.S. Application Data
(60) Provisional application No. 62/991,568, filed on Mar. 18, 2020.

(51) Int. Cl. C07K 16/28; A61P 37/02; G01N 33/68

(52) U.S. Cl. CPC C07K 16/2866; A61P 37/02; G01N 33/68; C07K 2317/14; C07K 2317/31; C07K 2317/33; C07K 2317/52; C07K 2317/565

(57) ABSTRACT

Provided are various embodiments relating to anti-IL4R antibodies that bind to canine IL4R. In various embodiments, such anti-IL4R antibodies can be used in methods to treat IL4/IL13-induced conditions, such as atopic dermatitis, allergic dermatitis, pruritus, asthma, psoriasis, scleroderma and eczema, in companion animals, such as canines and felines. Also provided are various embodiments relating to variant IgG Fc polypeptides and variant light chain constant regions of companion animal species for the preparation of antibodies or bispecific antibodies.

[0001] This application claims the benefit of U.S. Provisional Application No. 62/991,568, filed Mar. 18, 2020, which is incorporated by reference herein in its entirety for any purpose.

### SEQUENCE LISTING

[0002] This application is filed with a Sequence Listing in electronic format. The Sequence Listing is provided as a file entitled “01157-0032-00PCT_ST25.txt” created on Mar. 17, 2021, which is 774 KB in size. The information in the electronic format of the sequence listing is incorporated herein by reference in its entirety.

### FIELD

[0003] This disclosure relates to isolated anti-IL4 receptor (IL4R) antibodies, for example, binding to canine or feline IL4R and reducing binding with IL4 or IL13, and methods of using the same, for example, treating IL4-induced and/or IL13-induced conditions or reducing IL4 or IL13 signaling function in cells, for instance in companion animals, such as canines and felines.

### BACKGROUND

[0004] Interleukin 4 (IL4) is a cytokine that induces naïve T helper cells to differentiate to Th2 cells. IL4 can also stimulate activated B cell and T cell proliferation and induce B cell class switching to IgE. IL13 has similar effect on immune cells as IL4. Both cytokines are associated with allergies.

[0005] IL4 receptor is known as IL4Ralpha or IL4R. IL4R can pair with a common gamma chain receptor and specifically bind IL4. IL4R can also pair with IL13Ra1 and together they can bind either IL4 or IL13. Thus, blocking binding sites on IL4R can potentially reduce binding of IL4 and/or IL13 and reduce signaling effect of these two cytokines.

[0006] Companion animals, such as cats, dogs, and horses, suffer from many skin diseases similar to human skin diseases, including atopic dermatitis and allergic conditions. There remains a need, therefore, for methods and compounds that can be used specifically to block companion animal IL4 or/and IL13 for treating IL4-induced and/or IL13-induced conditions and for reducing IL4/IL13 signaling.

### SUMMARY

[0007] Embodiment 1. An isolated antibody that binds to canine IL4R or feline IL4R, wherein the antibody binds to an epitope comprising the amino acid sequence of LX₁₀ FMGSENX₁₁T (SEQ ID NO: 85), wherein X₁₀ is D or N and X₁₁ is H or R, and wherein the antibody comprises a variant canine or feline IgG Fc polypeptide capable of binding to neonatal Fc receptor (FcRn) with an increased affinity relative to the wild-type Fc polypeptide.

[0008] Embodiment 2. An isolated antibody that binds to canine IL4R or feline IL4R, wherein the antibody binds to an epitope comprising the amino acid sequence of RLSYQLX₁₀FMGSENX₁₁TCYPEN (SEQ ID NO: 86), wherein X₁₀ is D or N and X₁₁ is H or R, wherein the antibody comprises a variant canine or feline IgG Fc polypeptide capable of binding to neonatal Fc receptor (FcRn) with an increased affinity relative to the wild-type Fc polypeptide.

[0009] Embodiment 3. The isolated antibody of embodiment 2, wherein the antibody binds to an epitope comprising the amino acid sequence of LX₁₀FMGSENX₁₁T (SEQ ID NO: 85), wherein X₁₀ is D or N and X₁₁ is H or R.

[0010] Embodiment 4. The isolated antibody of any one of the preceding embodiments, wherein the antibody binds to an epitope comprising the amino acid sequence of SEQ ID NO: 88 or SEQ ID NO: 91.

[0011] Embodiment 5. The isolated antibody of any one of the preceding embodiments, wherein the antibody binds to an epitope comprising the amino acid sequence of SEQ ID NO: 89 or SEQ ID NO: 92.

[0012] Embodiment 6. The isolated antibody of any one of the preceding embodiments, wherein the antibody binds to an epitope comprising the amino acid sequence of SMX₁₂X₁₃DDX₁₄VEADVYQLX₁₅LWAGX₁₆Q (SEQ ID NO: 87), wherein X₁₂ is P or L, X₁₃ is I or M, X₁₄ is A or F, X₁₅ is D or H, and X₁₆ is Q or T.

[0013] Embodiment 7. An isolated antibody that binds to canine IL4R or feline IL4R, wherein the antibody binds to an epitope comprising the amino acid sequence of SMX₁₂X₁₃DDX₁₄VEADVYQLX₁₅LWAGX₁₆Q (SEQ ID NO: 87), wherein X₁₂ is P or L, X₁₃ is I or M, X₁₄ is A or F, X₁₅ is D or H, and X₁₆ is Q or T, and wherein the antibody comprises a variant canine or feline IgG Fc polypeptide capable of binding to neonatal Fc receptor (FcRn) with an increased affinity relative to the wild-type Fc polypeptide.

[0014] Embodiment 8. The isolated antibody of any one of the preceding embodiments, wherein the antibody binds to an epitope comprising the amino acid sequence of SEQ ID NO: 90 or SEQ ID NO: 93.

[0015] Embodiment 9. The isolated antibody of any one of the preceding embodiments, wherein the antibody binds to canine IL4R or feline IL4R with a dissociation constant (Kd) of less than 5×10⁻⁶ M, less than 1×10⁻⁶ M, less than 5×10⁻⁷ M, less than 1×10⁻⁷ M, less than 5×10⁻⁸ M, less than 1×10⁻⁸ M, less than 5×10⁻⁹ M, less than 1×10⁻⁹ M, less than 5×10⁻¹⁹ M, less than 1×10⁻¹⁹ M, less than 5×10⁻¹¹ M, less than 1×10⁻¹¹ M, less than 5×10⁻¹² M, or less than 1×10⁻¹² M, as measured by biolayer interferometry.

[0016] Embodiment 10. The antibody of any one of the preceding embodiments, wherein the antibody binds to canine IL4R or feline IL4R as determined by immunoblot analysis or biolayer interferometry.

[0017] Embodiment 11. The isolated antibody of any one of the preceding embodiments, wherein the antibody reduces binding of a canine and/or feline IL4 polypeptide and/or a canine and/or feline IL13 polypeptide to canine IL4R and/or feline IL4R, as measured by biolayer interferometry.

[0018] Embodiment 12. The isolated antibody of any one of the preceding embodiments, wherein the antibody competes with monoclonal Clone B or Clone I antibody in binding to canine IL4R or feline IL4R.

[0019] Embodiment 13. The isolated antibody of any one of the preceding embodiments, wherein the antibody is a monoclonal antibody.

[0020] Embodiment 14. The isolated antibody of any one of the preceding embodiments, wherein the antibody is a canine, a caninized, a feline, a felinized, or a chimeric antibody.

[0021] Embodiment 15. The isolated antibody of any one of the preceding embodiments, wherein the antibody is a chimeric antibody comprising one or more murine variable heavy chain framework regions or one or more murine variable light chain framework regions.

[0022] Embodiment 16. An isolated antibody that binds to canine IL4R or feline IL4R, wherein the antibody comprises a heavy chain comprising:
[0023] a) a CDR-H1 sequence having at least 85%, at least 90%, at least 95%, at least 98%, or 100% sequence identity to the amino acid sequence of GYTFTSYVMX₁ (SEQ ID NO: 1), wherein X1 is H or N;
[0024] b) a CDR-H2 sequence having at least 85%, at least 90%, at least 95%, at least 98%, or 100% sequence identity to the amino acid sequence of YINPX₂NDGTFYX₃GX₄X₅X₆G (SEQ ID NO: 2), wherein X₂ is K, A, or N, X₃ is N or A, X₄ is K or A, X₅ is F or V, and X₆ is K or Q, or YINPX₂NDGT (SEQ ID NO: 268), wherein X₂ is K, A, or N; and
[0025] c) a CDR-H3 sequence having at least 85%, at least 90%, at least 95%, at least 98%, or 100% sequence identity to the amino acid sequence of FX₇YGX₈AY (SEQ ID NO: 3), wherein X₇ is N or Y, and X₈ s I or F; and
[0026] wherein the antibody comprises a variant canine or feline IgG Fc polypeptide capable of binding to neonatal Fc receptor (FcRn) with an increased affinity relative to the wild-type Fc polypeptide.

[0027] Embodiment 17. The isolated antibody of any one of the preceding embodiments, comprising a heavy chain comprising:
[0028] a) a CDR-H1 sequence having at least 85%, at least 90%, at least 95%, at least 98%, or 100% sequence identity to the amino acid sequence of GYTFTSYVMX₁ (SEQ ID NO: 1), wherein X₁ is H or N;
[0029] b) a CDR-H2 sequence having at least 85%, at least 90%, at least 95%, at least 98%, or 100% sequence identity to the amino acid sequence of YINPX₂NDGTFYX₃GX₄X₅X₆G (SEQ ID NO: 2), wherein X ₂ is K, A, or N, X ₃ is N or A, X ₄ is K or A, X₅ is F or V, and X₆ is K or Q, or YINPX₂NDGT (SEQ ID NO: 268), wherein X₂ is K, A, or N; and
[0030] c) a CDR-H3 sequence having at least 85%, at least 90%, at least 95%, at least 98%, or 100% sequence identity to the amino acid sequence of FX₇YGX₈AY (SEQ ID NO: 3), wherein X₇ is N or Y, and X₈ s I or F.

[0031] Embodiment 18. The isolated antibody of any one of the preceding embodiments, comprising a heavy chain comprising:
[0032] a) a CDR-H1 sequence having at least 85%, at least 90%, at least 95%, at least 98%, or 100% sequence identity to the amino acid sequence of SEQ ID NO: 7, SEQ ID NO: 29, or SEQ ID NO: 358;
[0033] b) a CDR-H2 sequence having at least 85%, at least 90%, at least 95%, at least 98%, or 100% sequence identity to the amino acid sequence of SEQ ID NO: 8, SEQ ID NO: 269, SEQ ID NO: 30, SEQ ID NO: 271, SEQ ID NO: 359, or SEQ ID NO: 272; and
[0034] c) a CDR-H3 sequence having at least 85%, at least 90%, at least 95%, at least 98%, or 100% sequence identity to the amino acid sequence of SEQ ID NO: 9 or SEQ ID NO: 31.

[0035] Embodiment 19. The isolated antibody of any one of the preceding embodiments, comprising a heavy chain comprising:
[0036] a) a CDR-H1 comprising the amino acid sequence of SEQ ID NO:7, SEQ ID NO: 29, or SEQ ID NO: 358;
[0037] b) a CDR-H2 comprising the amino acid sequence of SEQ ID NO: 8, SEQ ID NO: 269, SEQ ID NO: 30, SEQ ID NO: 271, SEQ ID NO: 359, or SEQ ID NO: 272; and
[0038] c) a CDR-H3 comprising the amino acid sequence of SEQ ID NO: 9 or SEQ ID NO: 31.

[0039] Embodiment 20. An isolated antibody that binds to canine IL4R or feline IL4R, wherein the antibody comprises a light chain comprising:
[0040] a) a CDR-L1 sequence having at least 85%, at least 90%, at least 95%, at least 98%, or 100% sequence identity to the amino acid sequence of RASQEISGYLX₉ (SEQ ID NO: 4) wherein X₉ is S or A;
[0041] b) a CDR-L2 sequence having at least 85%, at least 90%, at least 95%, at least 98%, or 100% sequence identity to the amino acid sequence of AASX₁₀X₁₁DX₁₂ (SEQ ID NO: 5), wherein X₁₀ is T or N, X₁₁ is R or L, and X₁₂ is S or T; and
[0042] c) a CDR-L3 sequence having at least 85%, at least 90%, at least 95%, at least 98%, or 100% sequence identity to the amino acid sequence of X₁₃QYASYPWT (SEQ ID NO: 6), wherein X₁₃ is V or L; and
[0043] wherein the antibody comprises a variant canine or feline IgG Fc polypeptide capable of binding to neonatal Fc receptor (FcRn) with an increased affinity relative to the wild-type Fc polypeptide.

[0044] Embodiment 21. The isolated antibody of any one of the preceding embodiments, comprising a light chain comprising:
[0045] a) a CDR-L1 sequence having at least 85%, at least 90%, at least 95%, at least 98%, or 100% sequence identity to the amino acid sequence of RASQEISGYLX₉ (SEQ ID NO: 4) wherein X₉ is S or A;
[0046] b) a CDR-L2 sequence having at least 85%, at least 90%, at least 95%, at least 98%, or 100% sequence identity to the amino acid sequence of AASX₁₀X₁₁DX₁₂ (SEQ ID NO: 5), wherein X₁₀ is T or N, X₁₁ is R or L, and X₁₂ is S or T; and
[0047] c) a CDR-L3 sequence having at least 85%, at least 90%, at least 95%, at least 98%, or 100% sequence identity to the amino acid sequence of X₁₃QYASYPWT (SEQ ID NO: 6), wherein X ₁₃ is V or L.

[0048] Embodiment 22. An isolated antibody that binds to canine IL4R or feline IL4R, wherein the antibody comprises:
[0049] a) a CDR-H1 sequence having at least 85%, at least 90%, at least 95%, at least 98%, or 100% sequence identity to the amino acid sequence of GYTFTSYVMX₁ (SEQ ID NO: 1), wherein X₁ is H or N;
[0050] b) a CDR-H2 sequence having at least 85%, at least 90%, at least 95%, at least 98%, or 100% sequence identity to the amino acid sequence of YINPX₂NDGTFYX₃GX₄X₅X₆G (SEQ ID NO: 2), wherein X₂ is K, A, or N, X₃ is N or A, X₄ is K or A, X₅ is F or V, and X₆ is K or Q, or YINPX₂NDGT (SEQ ID NO: 268), wherein X₂ is K, A, or N; and
[0051] c) a CDR-H3 sequence having at least 85%, at least 90%, at least 95%, at least 98%, or 100% sequence identity to the amino acid sequence of FX₇YGX₈AY (SEQ ID NO: 3), wherein X ₇ is N or Y, and X₈ s I or F;
[0052] d) a CDR-L1 sequence having at least 85%, at least 90%, at least 95%, at least 98%, or 100% sequence identity to the amino acid sequence of RASQEISGYLX₉ (SEQ ID NO: 4) wherein X₉ is S or A;
[0053] e) a CDR-L2 sequence having at least 85%, at least 90%, at least 95%, at least 98%, or 100% sequence identity to the amino acid sequence of AASX₁₀X₁₁DX₁₂ (SEQ ID NO: 5), wherein X₁₀ is T or N, X₁₁ is R or L, and X₁₂ is S or T; and
[0054] f) a CDR-L3 sequence having at least 85%, at least 90%, at least 95%, at least 98%, or 100% sequence identity to the amino acid sequence of X₁₃QYASYPWT (SEQ ID NO: 6), wherein X₁₃ is V or L; and
[0055] wherein the antibody comprises a variant canine or feline IgG Fc polypeptide capable of binding to neonatal Fc receptor (FcRn) with an increased affinity relative to the wild-type Fc polypeptide.

[0056] Embodiment 23. The isolated antibody of any one of the preceding embodiments, comprising a light chain comprising:
[0057] a) a CDR-L1 sequence having at least 85%, at least 90%, at least 95%, at least 98%, or 100% sequence identity to the amino acid sequence of SEQ ID NO: 14, SEQ ID NO: 36, or SEQ ID NO: 360;
[0058] b) a CDR-L2 sequence having at least 85%, at least 90%, at least 95%, at least 98%, or 100% sequence identity to the amino acid sequence of SEQ ID NO: 15, SEQ ID NO: 37, SEQ ID NO: 361, or SEQ ID NO: 362; and
[0059] c) a CDR-L3 sequence having at least 85%, at least 90%, at least 95%, at least 98%, or 100% sequence identity to the amino acid sequence of SEQ ID NO: 16 or SEQ ID NO: 38.

[0060] Embodiment 24. The isolated antibody of any one of the preceding embodiments, comprising a light chain comprising:
[0061] a) a CDR-L1 comprising the amino acid sequence of SEQ ID NO: 14, SEQ ID NO: 36, or SEQ ID NO: 360;
[0062] b) a CDR-L2 comprising the amino acid sequence of SEQ ID NO: 15, SEQ ID NO: 37, SEQ ID NO: 361, or SEQ ID NO: 362; and
[0063] c) a CDR-L3 comprising the amino acid sequence of SEQ ID NO:16 or SEQ ID NO: 38.

[0064] Embodiment 25. The antibody of any one of embodiments 16 to 24, further comprising one or more of (a) a variable region heavy chain framework 1 (HC-FR1) sequence of SEQ ID NO: 10 or SEQ ID NO: 32; (b) a HC-1-R2 sequence of SEQ ID NO: 11 or SEQ ID NO: 33; (c) a HC-FR3 sequence of SEQ ID NO: 12, SEQ ID NO: 270, SEQ ID NO: 34, SEQ ID NO: 273; (d) a HC-FR4 sequence of SEQ ID NO: 13 or SEQ ID NO: 35; (e) a variable region light chain framework 1 (LC-FR1) sequence of SEQ ID NO: 17 or SEQ ID NO: 39; (f) an LC-FR2 sequence of SEQ ID NO: 18 or SEQ ID NO: 40; (g) an LC-FR3 sequence of SEQ ID NO: 19 or SEQ ID NO: 41; or (h) an LC-FR4 sequence of SEQ ID NO: 20 or SEQ ID NO: 42.

[0065] Embodiment 26. The antibody of any one of the preceding embodiments, wherein the antibody comprises:
[0066] a. (i) a variable heavy chain sequence having at least 85%, at least 90%, at least 95%, at least 98%, or 100% sequence identity to the amino acid sequence of SEQ ID NO: 21 or SEQ ID NO: 43; (ii) a variable light chain sequence having at least 85%, at least 90%, at least 95%, at least 98%, or 100% sequence identity to the amino acid sequence of SEQ ID NO: 22 or SEQ ID NO: 44; or (iii) a variable heavy chain sequence as in (i) and a variable light chain sequence as in (ii); or
[0067] b. (i) a variable heavy chain sequence having at least 85%, at least 90%, at least 95%, at least 98%, or 100% sequence identity to the amino acid sequence of SEQ ID NO: 59, SEQ ID NO: 60, SEQ ID NO: 63, SEQ ID NO: 64, SEQ ID NO: 274, or SEQ ID NO: 363; (ii) a variable light chain sequence having at least 85%, at least 90%, at least 95%, at least 98%, or 100% sequence identity to the amino acid sequence of SEQ ID NO: 61, SEQ ID NO: 62, SEQ ID NO: 65, SEQ ID NO: 66, SEQ ID NO: 275, or SEQ ID NO: 364; or (iii) a variable heavy chain sequence as in (i) and a variable light chain sequence as in (ii); or
[0068] c. (i) a variable heavy chain sequence having at least 85%, at least 90%, at least 95%, at least 98%, or 100% sequence identity to the amino acid sequence of SEQ ID NO: 67 or SEQ ID NO: 69; (ii) a variable light chain sequence having at least 85%, at least 90%, at least 95%, at least 98%, or 100% sequence identity to the amino acid sequence of SEQ ID NO: 68 or SEQ ID NO: 70; or (iii) a variable heavy chain sequence as in (i) and a variable light chain sequence as in (ii).

[0069] Embodiment 27. The antibody of any one of the preceding embodiments, wherein the antibody comprises a variable heavy chain sequence comprising the amino acid sequence of SEQ ID NO: 21, SEQ ID NO: 43, SEQ ID NO: 59, SEQ ID NO: 60, SEQ ID NO: 63, SEQ ID NO: 64, SEQ ID NO: 274, SEQ ID NO: 363, SEQ ID NO: 67, or SEQ ID NO: 69.

[0070] Embodiment 28. The antibody of any one of the preceding embodiments, wherein the antibody comprises a variable light chain sequence comprising the amino acid sequence of SEQ ID NO: 22, SEQ ID NO: 44, SEQ ID NO: 61, SEQ ID NO: 62, SEQ ID NO: 65, SEQ ID NO: 66, SEQ ID NO: 275, SEQ ID NO: 364, SEQ ID NO: 68, or SEQ ID NO: 70.

[0071] Embodiment 29. The antibody of any one of the preceding embodiments, wherein the antibody comprises:
[0072] a) a variable heavy chain sequence comprising the amino acid sequence of SEQ ID NO: 21 or SEQ ID NO: 43, and a variable light chain sequence comprising the amino acid sequence of SEQ ID NO: 22 or SEQ ID NO: 44;
[0073] b) a variable heavy chain sequence comprising the amino acid sequence of SEQ ID NO: 59, SEQ ID NO: 60, SEQ ID NO: 63, SEQ ID NO: 64, SEQ ID NO: 274, SEQ ID NO: 363, and a variable light chain sequence comprising the amino acid sequence of SEQ ID NO: 61, SEQ ID NO: 62, SEQ ID NO: 65, SEQ ID NO: 66, SEQ ID NO: 275, SEQ ID NO: 364; or
[0074] c) a variable heavy chain sequence comprising the amino acid sequence of SEQ ID NO: 67, SEQ ID NO: 69, SEQ ID NO: 365, or SEQ ID NO: 366, and a variable light chain sequence comprising the amino acid sequence of SEQ ID NO: 68, SEQ ID NO: 70, SEQ ID NO: 367, SEQ ID NO: 368, or SEQ ID NO: 369.

[0075] Embodiment 30. An isolated antibody, wherein the antibody comprises:
[0076] a) a variable heavy chain sequence comprising the amino acid sequence of SEQ ID NO: 21 or SEQ ID NO: 43, and a variable light chain sequence comprising the amino acid sequence of SEQ ID NO: 22 or SEQ ID NO: 44;
[0077] b) a variable heavy chain sequence comprising the amino acid sequence of SEQ ID NO: 59, SEQ ID NO: 60, SEQ ID NO: 63, SEQ ID NO: 64, SEQ ID NO: 274, or SEQ ID NO: 363, and a variable light chain sequence comprising the amino acid sequence of SEQ ID NO: 61, SEQ ID NO: 62, SEQ ID NO: 65, SEQ ID NO: 66, SEQ ID NO: 275, or SEQ ID NO: 364; or
[0078] c) a variable heavy chain sequence comprising the amino acid sequence of SEQ ID NO: 67, SEQ ID NO: 69, SEQ ID NO: 365, or SEQ ID NO: 366, and a variable light chain sequence comprising the amino acid sequence of SEQ ID NO: 68, SEQ ID NO: 70, SEQ ID NO: 367, SEQ ID NO: 368, or SEQ ID NO: 369, and
[0079] wherein the antibody comprises a variant canine or feline IgG Fc polypeptide capable of binding to neonatal Fc receptor (FcRn) with an increased affinity relative to the wild-type Fc polypeptide.

[0080] Embodiment 31. An isolated antibody that binds to canine IL4R or feline IL4R, wherein the antibody binds to an epitope comprising the amino acid sequence of SEQ ID NO: 354, and wherein the antibody comprises a variant canine or feline IgG Fc polypeptide capable of binding to neonatal Fc receptor (FcRn) with an increased affinity relative to the wild-type Fc polypeptide.

[0081] Embodiment 32. The isolated antibody of embodiment 31, wherein the antibody binds to canine IL4R or feline IL4R with a dissociation constant (Kd) of less than 5×10⁻⁶ M, less than 1×10⁻⁶ M, less than 5×10⁻⁷ M, less than 1×10⁻⁷ M, less than 5×10⁻⁸ M, less than 1×10⁻⁸ M, less than 5×10⁻⁹ M, less than 1×10⁻⁹ M, less than 5×10⁻¹⁹ M, less than 1×10⁻¹⁹ M, less than 5×10⁻¹¹ M, less than 1×10⁻¹¹ M, less than 5×10⁻¹² M, or less than 1×10⁻¹² M, as measured by biolayer interferometry.

[0082] Embodiment 33. The antibody of embodiment 31 or embodiment 32, wherein the antibody binds to canine IL4R or feline IL4R as determined by immunoblot analysis or biolayer interferometry.

[0083] Embodiment 34. The isolated antibody of any one of embodiments 31 to 33, wherein the antibody reduces binding of a canine and/or feline IL4 polypeptide and/or a canine and/or feline IL13 polypeptide to canine IL4R and/or feline IL4R, as measured by biolayer interferometry.

[0084] Embodiment 35. The isolated antibody of any one of embodiments 31 to 34, wherein the antibody competes with monoclonal M3 antibody in binding to canine IL4R or feline IL4R.

[0085] Embodiment 36. The isolated antibody of any one of embodiments 31 to 35, wherein the antibody is a monoclonal antibody.

[0086] Embodiment 37. The isolated antibody of any one of embodiments 31 to 36, wherein the antibody is a canine, a caninized, a feline, a felinized, or a chimeric antibody.

[0087] Embodiment 38. The isolated antibody of any one of embodiments 31 to 37, wherein the antibody is a chimeric antibody comprising one or more murine variable heavy chain framework regions or one or more murine variable light chain framework regions.

[0088] Embodiment 39. The isolated antibody of any one of embodiments 31 to 38, comprising a heavy chain comprising:
[0089] a) a CDR-H1 sequence having at least 85%, at least 90%, at least 95%, at least 98%, or 100% sequence identity to the amino acid sequence of SEQ ID NO: 278;
[0090] b) a CDR-H2 sequence having at least 85%, at least 90%, at least 95%, at least 98%, or 100% sequence identity to the amino acid sequence of SEQ ID NO: 279; and
[0091] c) a CDR-H3 sequence having at least 85%, at least 90%, at least 95%, at least 98%, or 100% sequence identity to the amino acid sequence of SEQ ID NO: 280.

[0092] Embodiment 40. The isolated antibody of any one of embodiments 31 to 39, comprising a light chain comprising:
[0093] a) a CDR-L1 sequence having at least 85%, at least 90%, at least 95%, at least 98%, or 100% sequence identity to the amino acid sequence of SEQ ID NO: 285;
[0094] b) a CDR-L2 sequence having at least 85%, at least 90%, at least 95%, at least 98%, or 100% sequence identity to the amino acid sequence of SEQ ID NO: 286; and
[0095] c) a CDR-L3 sequence having at least 85%, at least 90%, at least 95%, at least 98%, or 100% sequence identity to the amino acid sequence of SEQ ID NO: 287.

[0096] Embodiment 41. The isolated antibody of any one of embodiments 31 to 40, further comprising one or more of (a) a variable region heavy chain framework 1 (HC-FR1) sequence of SEQ ID NO: 281; (b) a HC-FR2 sequence of SEQ ID NO: 282; (c) a HC-FR3 sequence of SEQ ID NO: 283; (d) a HC-FR4 sequence of SEQ ID NO: 284; (e) a variable region light chain framework 1 (LC-FR1) sequence of SEQ ID NO: 288; (f) an LC-FR2 sequence of SEQ ID NO: 289; (g) an LC-FR3 sequence of SEQ ID NO: 290; or (h) an LC-FR4 sequence of SEQ ID NO: 291.

[0097] Embodiment 42. The isolated antibody of any one of embodiments 31 to 41, wherein the antibody comprises:
[0098] a. (i) a variable heavy chain sequence having at least 85%, at least 90%, at least 95%, at least 98%, or 100% sequence identity to the amino acid sequence of SEQ ID NO: 292; (ii) a variable light chain sequence having at least 85%, at least 90%, at least 95%, at least 98%, or 100% sequence identity to the amino acid sequence of SEQ ID NO: 293; or (iii) a variable heavy chain sequence as in (i) and a variable light chain sequence as in (ii); or
[0099] b. (i) a variable heavy chain sequence having at least 85%, at least 90%, at least 95%, at least 98%, or 100% sequence identity to the amino acid sequence of SEQ ID NO: 342 or SEQ ID NO: 343; (ii) a variable light chain sequence having at least 85%, at least 90%, at least 95%, at least 98%, or 100% sequence identity to the amino acid sequence of SEQ ID NO: 344; or (iii) a variable heavy chain sequence as in (i) and a variable light chain sequence as in (ii).

[0100] Embodiment 43. The isolated antibody of any one of embodiments 31 to 42, wherein the antibody comprises a variable heavy chain sequence comprising the amino acid sequence of SEQ ID NO: 292, SEQ ID NO: 342, or SEQ ID NO: 343.

[0101] Embodiment 44. The isolated antibody of any one of embodiments 31 to 43, wherein the antibody comprises a variable light chain sequence comprising the amino acid sequence of SEQ ID NO: 293 or SEQ ID NO: 344.

[0102] Embodiment 45. The isolated antibody of any one of embodiments 31 to 44, wherein the antibody comprises:
[0103] a) a variable heavy chain sequence comprising the amino acid sequence of SEQ ID NO: 292, and a variable light chain sequence comprising the amino acid sequence of SEQ ID NO: 293; and/or
[0104] b) a variable heavy chain sequence comprising the amino acid sequence of SEQ ID NO: 342 or SEQ ID NO: 343, and a variable light chain sequence comprising the amino acid sequence of SEQ ID NO: 344.

[0105] Embodiment 46. An isolated antibody comprising:
[0106] a) a variable heavy chain sequence comprising the amino acid sequence of SEQ ID NO: 292, and a variable light chain sequence comprising the amino acid sequence of SEQ ID NO: 293; or
[0107] b) a variable heavy chain sequence comprising the amino acid sequence of SEQ ID NO: 342 or SEQ ID NO: 343, and a variable light chain sequence comprising the amino acid sequence of SEQ ID NO: 344;
[0108] and wherein the antibody comprises a variant canine or feline IgG Fc polypeptide capable of binding to neonatal Fc receptor (FcRn) with an increased affinity relative to the wild-type Fc polypeptide.

[0109] Embodiment 47. An isolated antibody that binds to canine IL4R or feline IL4R, wherein the antibody binds to an epitope comprising the amino acid sequence of SEQ ID NO: 355 and/or an epitope comprising the amino acid sequence of SEQ ID NO: 356, and wherein the antibody comprises a variant canine or feline IgG Fc polypeptide capable of binding to neonatal Fc receptor (FcRn) with an increased affinity relative to the wild-type Fc polypeptide.

[0110] Embodiment 48. The isolated antibody of embodiment 47, wherein the antibody binds to canine IL4R or feline IL4R with a dissociation constant (Kd) of less than 5×10⁻⁶ M, less than 1×10⁻⁶ M, less than 5×10⁻⁷ M, less than 1×10⁻⁷ M, less than 5×10⁻⁸ M, less than 1×10⁻⁸ M, less than 5×10⁻⁹ M, less than 1×10⁻⁹ M, less than 5×10⁻¹⁹ M, less than 1×10⁻¹⁹ M, less than 5×10⁻¹¹ M, less than 1×10⁻¹¹ M, less than 5×10⁻¹² M, or less than 1×10⁻¹² M, as measured by biolayer interferometry.

[0111] Embodiment 49. The antibody of embodiment 47 or embodiment 48, wherein the antibody binds to canine IL4R or feline IL4R as determined by immunoblot analysis or biolayer interferometry.

[0112] Embodiment 50. The isolated antibody of any one of embodiments 47 to 49, wherein the antibody reduces binding of a canine and/or feline IL4 polypeptide and/or a canine and/or feline IL13 polypeptide to canine IL4R and/or feline IL4R, as measured by biolayer interferometry.

[0113] Embodiment 51. The isolated antibody of any one of embodiments 47 to 50, wherein the antibody competes with monoclonal M8 antibody in binding to canine IL4R or feline IL4R.

[0114] Embodiment 52. The isolated antibody of any one of embodiments 47 to 51, wherein the antibody is a monoclonal antibody.

[0115] Embodiment 53. The isolated antibody of any one of embodiments 47 to 52, wherein the antibody is a canine, a caninized, a feline, a felinized, or a chimeric antibody.

[0116] Embodiment 54. The isolated antibody of any one of embodiments 47 to 53, wherein the antibody is a chimeric antibody comprising one or more murine variable heavy chain framework regions or one or more murine variable light chain framework regions.

[0117] Embodiment 55. The isolated antibody of any one of embodiments 47 to 54, comprising a heavy chain comprising:
[0118] a) a CDR-H1 sequence having at least 85%, at least 90%, at least 95%, at least 98%, or 100% sequence identity to the amino acid sequence of SEQ ID NO: 310;
[0119] b) a CDR-H2 sequence having at least 85%, at least 90%, at least 95%, at least 98%, or 100% sequence identity to the amino acid sequence of SEQ ID NO: 311; and
[0120] c) a CDR-H3 sequence having at least 85%, at least 90%, at least 95%, at least 98%, or 100% sequence identity to the amino acid sequence of SEQ ID NO: 312.

[0121] Embodiment 56. The isolated antibody of any one of embodiments 47 to 55, comprising a light chain comprising:
[0122] a) a CDR-L1 sequence having at least 85%, at least 90%, at least 95%, at least 98%, or 100% sequence identity to the amino acid sequence of SEQ ID NO: 317;
[0123] b) a CDR-L2 sequence having at least 85%, at least 90%, at least 95%, at least 98%, or 100% sequence identity to the amino acid sequence of SEQ ID NO: 318; and
[0124] c) a CDR-L3 sequence having at least 85%, at least 90%, at least 95%, at least 98%, or 100% sequence identity to the amino acid sequence of SEQ ID NO: 319.

[0125] Embodiment 57. The isolated antibody of any one of embodiments 47 to 56, further comprising one or more of (a) a variable region heavy chain framework 1 (HC-FR1) sequence of SEQ ID NO: 313; (b) a HC-FR2 sequence of SEQ ID NO: 314; (c) a HC-FR3 sequence of SEQ ID NO: 315; (d) a HC-FR4 sequence of SEQ ID NO: 316; (e) a variable region light chain framework 1 (LC-FR1) sequence of SEQ ID NO: 320; (f) an LC-FR2 sequence of SEQ ID NO: 321; (g) an LC-1-R3 sequence of SEQ ID NO: 322; or (h) an LC-FR4 sequence of SEQ ID NO: 323.

[0126] Embodiment 58. The isolated antibody of any one of embodiments 47 to 57, wherein the antibody comprises:
[0127] (a) a variable heavy chain sequence having at least 85%, at least 90%, at least 95%, at least 98%, or 100% sequence identity to the amino acid sequence of SEQ ID NO: 324;
[0128] (b) a variable light chain sequence having at least 85%, at least 90%, at least 95%, at least 98%, or 100% sequence identity to the amino acid sequence of SEQ ID NO: 325; or
[0129] (c) a variable heavy chain sequence as in (a) and a variable light chain sequence as in (b).

[0130] Embodiment 59. The isolated antibody of any one of embodiments 47 to 58, wherein the antibody comprises a variable heavy chain sequence comprising the amino acid sequence of SEQ ID NO: 324.

[0131] Embodiment 60. The isolated antibody of any one of embodiments 47 to 59, wherein the antibody comprises a variable light chain sequence comprising the amino acid sequence of SEQ ID NO: 325.

[0132] Embodiment 61. The isolated antibody of any one of embodiments 47 to 60, wherein the antibody comprises: a variable heavy chain sequence comprising the amino acid sequence of SEQ ID NO: 324, and a variable light chain sequence comprising the amino acid sequence of SEQ ID NO: 325.

[0133] Embodiment 62. An isolated antibody comprising: a variable heavy chain sequence comprising the amino acid sequence of SEQ ID NO: 324, and a variable light chain sequence comprising the amino acid sequence of SEQ ID NO: 325, and wherein the antibody comprises a variant canine or feline IgG Fc polypeptide capable of binding to neonatal Fc receptor (FcRn) with an increased affinity relative to the wild-type Fc polypeptide.

[0134] Embodiment 63. An isolated antibody that binds to canine IL4R, wherein the antibody binds to an epitope comprising the amino acid sequence of SEQ ID NO: 357, and wherein the antibody comprises a variant canine or feline IgG Fc polypeptide capable of binding to neonatal Fc receptor (FcRn) with an increased affinity relative to the wild-type Fc polypeptide.

[0135] Embodiment 64. The isolated antibody of embodiment 63, wherein the antibody binds to canine IL4R with a dissociation constant (Kd) of less than 5×10⁻⁶ M, less than 1×10⁻⁶ M, less than 5×10⁻⁷ M, less than 1×10⁻⁷ M, less than 5×10⁻⁸ M, less than 1×10⁻⁸ M, less than 5×10⁻⁹ M, less than 1×10⁻⁹ M, less than 5×10⁻¹⁹ M, less than 1×10⁻¹⁹ M, less than 5×10⁻¹¹ M, less than 1×10⁻¹¹ M, less than 5×10⁻¹² M, or less than 1×10⁻¹² M, as measured by biolayer interferometry.

[0136] Embodiment 65. The antibody of embodiment 63 or embodiment 64, wherein the antibody binds to canine IL4R as determined by immunoblot analysis or biolayer interferometry.

[0137] Embodiment 66. The isolated antibody of any one of embodiments 63 to 65, wherein the antibody reduces binding of a canine IL4 polypeptide and/or a canine IL13 polypeptide to canine IL4R, as measured by biolayer interferometry.

[0138] Embodiment 67. The isolated antibody of any one of embodiments 63 to 66, wherein the antibody competes with monoclonal M9 antibody in binding to canine IL4R.

[0139] Embodiment 68. The isolated antibody of any one of embodiments 63 to 67, wherein the antibody is a monoclonal antibody.

[0140] Embodiment 69. The isolated antibody of any one of embodiments 63 to 68, wherein the antibody is a canine, a caninized, a feline, a felinized, or a chimeric antibody.

[0141] Embodiment 70. The isolated antibody of any one of embodiments 63 to 69, wherein the antibody is a chimeric antibody comprising one or more murine variable heavy chain framework regions or one or more murine variable light chain framework regions.

[0142] Embodiment 71. The isolated antibody of any one of embodiments 63 to 70, comprising a heavy chain comprising:
[0143] a) a CDR-H1 sequence having at least 85%, at least 90%, at least 95%, at least 98%, or 100% sequence identity to the amino acid sequence of SEQ ID NO: 326 or SEQ ID NO: 407;
[0144] b) a CDR-H2 sequence having at least 85%, at least 90%, at least 95%, at least 98%, or 100% sequence identity to the amino acid sequence of SEQ ID NO: 327; and
[0145] c) a CDR-H3 sequence having at least 85%, at least 90%, at least 95%, at least 98%, or 100% sequence identity to the amino acid sequence of SEQ ID NO: 328.

[0146] Embodiment 72. The isolated antibody of any one of embodiments 63 to 71, comprising a light chain comprising:
[0147] a) a CDR-L1 sequence having at least 85%, at least 90%, at least 95%, at least 98%, or 100% sequence identity to the amino acid sequence of SEQ ID NO: 333;
[0148] b) a CDR-L2 sequence having at least 85%, at least 90%, at least 95%, at least 98%, or 100% sequence identity to the amino acid sequence of SEQ ID NO: 334; and
[0149] c) a CDR-L3 sequence having at least 85%, at least 90%, at least 95%, at least 98%, or 100% sequence identity to the amino acid sequence of SEQ ID NO: 335.

[0150] Embodiment 73. The isolated antibody of any one of embodiments 63 to 72, further comprising one or more of (a) a variable region heavy chain framework 1 (HC-FR1) sequence of SEQ ID NO: 329; (b) a HC-FR2 sequence of SEQ ID NO: 330; (c) a HC-FR3 sequence of SEQ ID NO: 331; (d) a HC-FR4 sequence of SEQ ID NO: 332; (e) a variable region light chain framework 1 (LC-FR1) sequence of SEQ ID NO: 336; (f) an LC-FR2 sequence of SEQ ID NO: 337; (g) an LC-1-R3 sequence of SEQ ID NO: 338; or (h) an LC-FR4 sequence of SEQ ID NO: 339.

[0151] Embodiment 74. The isolated antibody of any one of embodiments 63 to 73, wherein the antibody comprises:
[0152] a. (i) a variable heavy chain sequence having at least 85%, at least 90%, at least 95%, at least 98%, or 100% sequence identity to the amino acid sequence of SEQ ID NO: 340; (ii) a variable light chain sequence having at least 85%, at least 90%, at least 95%, at least 98%, or 100% sequence identity to the amino acid sequence of SEQ ID NO: 341; or (iii) a variable heavy chain sequence as in (i) and a variable light chain sequence as in (ii); or
[0153] b. (i) a variable heavy chain sequence having at least 85%, at least 90%, at least 95%, at least 98%, or 100% sequence identity to the amino acid sequence of SEQ ID NO: 345 or SEQ ID NO: 346; (ii) a variable light chain sequence having at least 85%, at least 90%, at least 95%, at least 98%, or 100% sequence identity to the amino acid sequence of SEQ ID NO: 347 or SEQ ID NO: 408; or (iii) a variable heavy chain sequence as in (i) and a variable light chain sequence as in (ii).

[0154] Embodiment 75. The isolated antibody of any one of embodiments 63 to 74, wherein the antibody comprises a variable heavy chain sequence comprising the amino acid sequence of SEQ ID NO: 340, SEQ ID NO: 345, or SEQ ID NO: 346.

[0155] Embodiment 76. The isolated antibody of any one of embodiments 63 to 75, wherein the antibody comprises a variable light chain sequence comprising the amino acid sequence of SEQ ID NO: 341, SEQ ID NO: 347, or SEQ ID NO: 408.

[0156] Embodiment 77. The isolated antibody of any one of embodiments 63 to 76, wherein the antibody comprises:
[0157] a) a variable heavy chain sequence comprising the amino acid sequence of SEQ ID NO: 340, and a variable light chain sequence comprising the amino acid sequence of SEQ ID NO: 341; and/or
[0158] b) a variable heavy chain sequence comprising the amino acid sequence of SEQ ID NO: 345 or SEQ ID NO: 346, and a variable light chain sequence comprising the amino acid sequence of SEQ ID NO: 347 or SEQ ID NO: 408.

[0159] Embodiment 78. An isolated antibody comprising:
[0160] a) a variable heavy chain sequence comprising the amino acid sequence of SEQ ID NO: 340, and a variable light chain sequence comprising the amino acid sequence of SEQ ID NO: 341; or
[0161] b) a variable heavy chain sequence comprising the amino acid sequence of SEQ ID NO: 345, or SEQ ID NO: 346 and a variable light chain sequence comprising the amino acid sequence of SEQ ID NO: 347 or SEQ ID NO: 408, and wherein the antibody comprises a variant canine or feline IgG Fc polypeptide capable of binding to neonatal Fc receptor (FcRn) with an increased affinity relative to the wild-type Fc polypeptide.

[0162] Embodiment 79. An isolated antibody that binds to canine IL4R, comprising a heavy chain comprising:
[0163] a) a CDR-H1 sequence having at least 85%, at least 90%, at least 95%, at least 98%, or 100% sequence identity to the amino acid sequence of SEQ ID NO: 294;
[0164] b) a CDR-H2 sequence having at least 85%, at least 90%, at least 95%, at least 98%, or 100% sequence identity to the amino acid sequence of SEQ ID NO: 295; and
[0165] c) a CDR-H3 sequence having at least 85%, at least 90%, at least 95%, at least 98%, or 100% sequence identity to the amino acid sequence of SEQ ID NO: 296; and
[0166] wherein the antibody comprises a variant canine or feline IgG Fc polypeptide capable of binding to neonatal Fc receptor (FcRn) with an increased affinity relative to the wild-type Fc polypeptide.

[0167] Embodiment 80. An isolated antibody that binds to canine IL4R, comprising a light chain comprising:
[0168] a) a CDR-L1 sequence having at least 85%, at least 90%, at least 95%, at least 98%, or 100% sequence identity to the amino acid sequence of SEQ ID NO: 301;
[0169] b) a CDR-L2 sequence having at least 85%, at least 90%, at least 95%, at least 98%, or 100% sequence identity to the amino acid sequence of SEQ ID NO: 302; and
[0170] c) a CDR-L3 sequence having at least 85%, at least 90%, at least 95%, at least 98%, or 100% sequence identity to the amino acid sequence of SEQ ID NO: 303; and
[0171] wherein the antibody comprises a variant canine or feline IgG Fc polypeptide capable of binding to neonatal Fc receptor (FcRn) with an increased affinity relative to the wild-type Fc polypeptide.

[0172] Embodiment 81. The isolated antibody of embodiment 79, comprising a light chain comprising:
[0173] a) a CDR-L1 sequence having at least 85%, at least 90%, at least 95%, at least 98%, or 100% sequence identity to the amino acid sequence of SEQ ID NO: 301;
[0174] b) a CDR-L2 sequence having at least 85%, at least 90%, at least 95%, at least 98%, or 100% sequence identity to the amino acid sequence of SEQ ID NO: 302; and
[0175] c) a CDR-L3 sequence having at least 85%, at least 90%, at least 95%, at least 98%, or 100% sequence identity to the amino acid sequence of SEQ ID NO: 303.

[0176] Embodiment 82. The isolated antibody of any one of embodiments 79 to 81, wherein the antibody binds to canine IL4R with a dissociation constant (Kd) of less than 5×10⁻⁶ M, less than 1×10⁻⁶ M, less than 5×10⁻⁷ M, less than 1×10⁻⁷ M, less than 5×10⁻⁸ M, less than 1×10⁻⁸ M, less than 5×10⁻⁹ M, less than 1×10⁻⁹ M, less than 5×10⁻¹⁹ M, less than 1×10⁻¹⁹ M, less than 5×10⁻¹¹ M, less than 1×10⁻¹¹ M, less than 5×10⁻¹² M, or less than 1×10⁻¹² M, as measured by biolayer interferometry.

[0177] Embodiment 83. The antibody of any one of embodiments 79 to 82, wherein the antibody binds to canine IL4R as determined by immunoblot analysis or biolayer interferometry.

[0178] Embodiment 84. The isolated antibody of any one of embodiments 79 to 83, wherein the antibody reduces binding of a canine IL4 polypeptide and/or a canine IL13 polypeptide to canine IL4R, as measured by biolayer interferometry.

[0179] Embodiment 85. The isolated antibody of any one of embodiments 79 to 84, wherein the antibody competes with monoclonal M5 antibody in binding to canine IL4R.

[0180] Embodiment 86. The isolated antibody of any one of embodiments 79 to 85, wherein the antibody is a monoclonal antibody.

[0181] Embodiment 87. The isolated antibody of any one of embodiments 79 to 86, wherein the antibody is a canine, a caninized, a feline, a felinized, or a chimeric antibody.

[0182] Embodiment 88. The isolated antibody of any one of embodiments 79 to 87, wherein the antibody is a chimeric antibody comprising one or more murine variable heavy chain framework regions or one or more murine variable light chain framework regions.

[0183] Embodiment 89. The isolated antibody of any one of embodiments 79 to 88, further comprising one or more of (a) a variable region heavy chain framework 1 (HC-FR1) sequence of SEQ ID NO: 297; (b) a HC-FR2 sequence of SEQ ID NO: 298; (c) a HC-FR3 sequence of SEQ ID NO: 299; (d) a HC-FR4 sequence of SEQ ID NO: 300; (e) a variable region light chain framework 1 (LC-FR1) sequence of SEQ ID NO: 304; (f) an LC-FR2 sequence of SEQ ID NO: 305; (g) an LC-1-R3 sequence of SEQ ID NO: 306; or (h) an LC-FR4 sequence of SEQ ID NO: 307.

[0184] Embodiment 90. The isolated antibody of any one of embodiments 79 to 89, wherein the antibody comprises:
[0185] (a) a variable heavy chain sequence having at least 85%, at least 90%, at least 95%, at least 98%, or 100% sequence identity to the amino acid sequence of SEQ ID NO: 308;
[0186] (b) a variable light chain sequence having at least 85%, at least 90%, at least 95%, at least 98%, or 100% sequence identity to the amino acid sequence of SEQ ID NO: 309; or
[0187] (c) a variable heavy chain sequence as in (a) and a variable light chain sequence as in (b).

[0188] Embodiment 91. The isolated antibody of any one of embodiments 79 to 90, wherein the antibody comprises a variable heavy chain sequence comprising the amino acid sequence of SEQ ID NO: 308.

[0189] Embodiment 92. The isolated antibody of any one of embodiments 79 to 91, wherein the antibody comprises a variable light chain sequence comprising the amino acid sequence of SEQ ID NO: 309.

[0190] Embodiment 93. The isolated antibody of any one of embodiments 79 to 92, wherein the antibody comprises: a variable heavy chain sequence comprising the amino acid sequence of SEQ ID NO: 308, and a variable light chain sequence comprising the amino acid sequence of SEQ ID NO: 309.

[0191] Embodiment 94. An isolated antibody comprising: a variable heavy chain sequence comprising the amino acid sequence of SEQ ID NO: 308, and a variable light chain sequence comprising the amino acid sequence of SEQ ID NO: 309, and wherein the antibody comprises a variant canine or feline IgG Fc polypeptide capable of binding to neonatal Fc receptor (FcRn) with an increased affinity relative to the wild-type Fc polypeptide.

[0192] Embodiment 95. The antibody of any one of the preceding embodiments, wherein the variant IgG Fc polypeptide is a variant canine IgG-A Fc polypeptide; a variant canine IgG-B Fc polypeptide; a variant IgG-C Fc polypeptide; a variant IgG-D Fc polypeptide; a variant feline IgG1a Fc polypeptide; a variant feline IgG1b Fc polypeptide; or a variant feline IgG2 Fc polypeptide.

[0193] Embodiment 96. The antibody of any one of the preceding embodiments, wherein the variant IgG Fc polypeptide comprises at least one amino acid modification relative to a wild-type IgG Fc polypeptide, wherein the variant IgG Fc polypeptide has increased binding affinity to Protein A relative to the wild-type IgG Fc polypeptide; reduced binding affinity to C1q relative to the wild-type IgG Fc polypeptide; and/or reduced binding affinity to CD16 relative to the wild-type IgG Fc polypeptide.

[0194] Embodiment 97. The antibody of any one of the preceding embodiments, wherein the variant IgG Fc polypeptide comprises at least one amino acid modification to a hinge region relative to a wild-type IgG Fc polypeptide, wherein the variant IgG Fc polypeptide has increased recombinant production and/or increased hinge disulfide formation relative to the wild-type IgG Fc polypeptide, as determined by SDS-PAGE analysis under reducing and/or nonreducing conditions.

[0195] Embodiment 98. The antibody of any one of the preceding embodiments, wherein the variant IgG Fc polypeptide comprises:
[0196] a) at least one amino acid substitution at a position corresponding to position 21, 23, 25, 80, 205, and/or 207 of SEQ ID NO: 162;
[0197] b) at least one amino acid substitution at a position corresponding to position 5, 38, 39, 94, 97, and/or 98 of SEQ ID NO: 163;
[0198] c) at least one amino acid substitution at a position corresponding to position 5, 21, 23, 24, 38, 39, 93, 97, and/or 98 of SEQ ID NO: 165;
[0199] d) at least one amino acid substitution at a position corresponding to position 21, 23, 25, 80, and/or 207 of SEQ ID NO: 167;
[0200] e) at least one amino acid substitution at a position corresponding to position 16 and/or 198 of SEQ ID NO: 203, SEQ ID NO: 204, SEQ ID NO: 205, or SEQ ID NO: 206; and/or
[0201] f) at least one amino acid substitution at a position corresponding to position 14 and/or 16 of SEQ ID NO: 207.

[0202] Embodiment 99. The antibody of any one of the preceding embodiments, wherein the variant IgG Fc polypeptide comprises:
[0203] a) at least one amino acid substitution at position 21, 23, 25, 80, 205, and/or 207 of SEQ ID NO: 162;
[0204] b) at least one amino acid substitution at position 5, 38, 39, 94, 97, and/or 98 of SEQ ID NO: 163;
[0205] c) at least one amino acid substitution at position 5, 21, 23, 24, 38, 39, 93, 97, and/or 98 of SEQ ID NO: 164;
[0206] d) at least one amino acid substation at position 21, 23, 25, 80, and/or 207 of SEQ ID NO: 165;
[0207] e) at least one amino acid substitution at position 16 and/or 198 of SEQ ID NO: 203, SEQ ID NO: 204, SEQ ID NO: 205, or SEQ ID NO: 206; and/or
[0208] f) at least one amino acid substitution at position 14 and/or 16 of SEQ ID NO: 207.

[0209] Embodiment 100. The antibody of any one of the preceding embodiments, wherein the variant IgG Fc polypeptide comprises:
[0210] a) a threonine at a position corresponding to position 21 of SEQ ID NO: 162, a leucine at a position corresponding to position 23 of SEQ ID NO: 162, an alanine at a position corresponding to position 25 of SEQ ID NO: 162, a glycine at a position corresponding to position 80 of SEQ ID NO: 162, an alanine at a position corresponding to position 205 of SEQ ID NO: 162, and/or a histidine at a position corresponding to position 207 of SEQ ID NO: 162;
[0211] b) a proline at a position corresponding to position 5 of SEQ ID NO: 163, a glycine at a position corresponding to position 38 of SEQ ID NO: 163, an arginine at a position corresponding to position 39 of SEQ ID NO: 163, an arginine at a position corresponding to position 93 of SEQ ID NO: 163, an isoleucine at a position corresponding to position 97 of SEQ ID NO: 163, and/or a glycine at a position corresponding to position 98 of SEQ ID NO: 163;
[0212] c) a proline at a position corresponding to position 5 of SEQ ID NO: 164, a threonine at a position corresponding to position 21 of SEQ ID NO: 164, a leucine at a position corresponding to position 23 of SEQ ID NO: 164, an isoleucine at a position corresponding to position 24 of SEQ ID NO: 164, a glycine at a position corresponding to position 38 of SEQ ID NO: 164, an arginine at a position corresponding to position 39 of SEQ ID NO: 164, an arginine at a position corresponding to position 93 of SEQ ID NO: 164, an isoleucine at a position corresponding to position 97 of SEQ ID NO: 164, and/or a glycine at a position corresponding to position 98 of SEQ ID NO: 164;
[0213] d) a threonine at a position corresponding to position 21 of SEQ ID NO: 165, a leucine at a position corresponding to position 23 of SEQ ID NO: 165, an alanine at a position corresponding to position 25 of SEQ ID NO: 165, a glycine at a position corresponding to position 80 of SEQ ID NO: 165, and/or a histidine at a position corresponding to position 207 of SEQ ID NO: 165;
[0214] e) a proline at a position corresponding to position 16 of SEQ ID NO: 203, SEQ ID NO: 204, SEQ ID NO: 205, or SEQ ID NO: 206 and/or an alanine at a position corresponding to position 198 of S SEQ ID NO: 203, SEQ ID NO: 204, SEQ ID NO: 205, or SEQ ID NO: 206; and/or
[0215] f) a cysteine at a position corresponding to position 14 of SEQ ID NO: 207 and/or a proline at a position corresponding to position 16 of SEQ ID NO: 207.

[0216] Embodiment 101. The antibody of any one of the preceding embodiments, wherein the variant IgG Fc polypeptide comprises:
[0217] a) a threonine at position 21 of SEQ ID NO: 162, a leucine at position 23 of SEQ ID NO: 162, an alanine at position 25 of SEQ ID NO: 162, a glycine at position 80 of SEQ ID NO: 162, an alanine at position 205 of SEQ ID NO: 162, and/or a histidine at position 207 of SEQ ID NO: 162;
[0218] b) a proline at position 5 of SEQ ID NO: 163, a glycine at position 38 of SEQ ID NO: 163, an arginine at position 39 of SEQ ID NO: 163, an arginine at position 93 of SEQ ID NO: 163, an isoleucine at position 97 of SEQ ID NO: 163, and/or a glycine at position 98 of SEQ ID NO: 163;
[0219] c) a proline at position 5 of SEQ ID NO: 164, a threonine at position 21 of SEQ ID NO: 164, a leucine at position 23 of SEQ ID NO: 164, an isoleucine at position 24 of SEQ ID NO: 164, a glycine at position 38 of SEQ ID NO: 164, an arginine at position 39 of SEQ ID NO: 164, an arginine at position 93 of SEQ ID NO: 164, an isoleucine at position 97 of SEQ ID NO: 164, and/or a glycine at position 98 of SEQ ID NO: 164;
[0220] d) a threonine at position 21 of SEQ ID NO: 165, a leucine at position 23 of SEQ ID NO: 165, an alanine at position 25 of SEQ ID NO: 165, a glycine at position 80 of SEQ ID NO: 165, and/or a histidine at position 207 of SEQ ID NO: 165;
[0221] e) a proline at position 16 of SEQ ID NO: 203, SEQ ID NO: 204, SEQ ID NO: 205, or SEQ ID NO: 206 and/or an alanine at position 198 of SEQ ID NO: 203, SEQ ID NO: 204, SEQ ID NO: 205, or SEQ ID NO: 206; and/or
[0222] f) a cysteine at position 14 of SEQ ID NO: 207 and/or a proline at position 16 of SEQ ID NO: 207.

[0223] Embodiment 102. The antibody of any one of the preceding embodiments, wherein the variant IgG Fc polypeptide comprises a CH1 region comprising at least one amino acid modification relative to a wild-type canine or feline IgG CH1 region, wherein the variant IgG Fc polypeptide comprises:
[0224] a) at least one amino acid substitution at a position corresponding to position 24 and/or position 30 of SEQ ID NO: 227, SEQ ID NO: 228, SEQ ID NO: 229, SEQ ID NO: 230, or SEQ ID NO: 237; or
[0225] b) at least one amino acid substitution at a position corresponding to position 24 and/or position 29 of SEQ ID NO: 238.

[0226] Embodiment 103. An antibody comprising a variant IgG Fc polypeptide comprising a CH1 region comprising at least one amino acid modification relative to a wild-type canine or feline IgG CH1 region, wherein the variant IgG Fc polypeptide comprises:
[0227] a) at least one amino acid substitution at a position corresponding to position 24 and/or position 30 of SEQ ID NO: 227, SEQ ID NO: 228, SEQ ID NO: 229, SEQ ID NO: 230, or SEQ ID NO: 237; or
[0228] b) at least one amino acid substitution at a position corresponding to position 24 and/or position 29 of SEQ ID NO: 238; and
[0229] wherein the antibody comprises a variant canine or feline IgG Fc polypeptide capable of binding to neonatal Fc receptor (FcRn) with an increased affinity relative to the wild-type Fc polypeptide.

[0230] Embodiment 104. The antibody of any one of the preceding embodiments, wherein the variant IgG Fc polypeptide comprises a CH1 region comprising at least one amino acid modification relative to a wild-type canine or feline IgG CH1 region, wherein the variant IgG Fc polypeptide comprises:
[0231] a) at least one amino acid substitution at position 24 and/or position 30 of SEQ ID NO: 227, SEQ ID NO: 228, SEQ ID NO: 229, SEQ ID NO: 230, or SEQ ID NO: 237; or
[0232] b) at least one amino acid substitution at position 24 and/or position 29 of SEQ ID NO: 238.

[0233] Embodiment 105. The antibody of any one of the preceding embodiments, wherein the variant IgG Fc polypeptide comprises a CH1 region comprising at least one amino acid modification relative to a wild-type canine or feline IgG CH1 region, wherein the variant IgG Fc polypeptide comprises:
[0234] a) a leucine at a position corresponding to position 24 and/or an asparagine at a position corresponding to position 30 of SEQ ID NO: 227, SEQ ID NO: 228, SEQ ID NO: 229, SEQ ID NO: 230, or SEQ ID NO: 237; or
[0235] b) a leucine at a position corresponding to position 24 and/or an asparagine at a position corresponding to position 29 of SEQ ID NO: 238.

[0236] Embodiment 106. The antibody of any one of the preceding embodiments, wherein the variant IgG Fc polypeptide comprises a CH1 region comprising at least one amino acid modification relative to a wild-type canine or feline IgG CH1 region, wherein the variant IgG Fc polypeptide comprises:
[0237] a) a leucine at position 24 and/or an asparagine at position 30 of SEQ ID NO: 227, SEQ ID NO: 228, SEQ ID NO: 229, SEQ ID NO: 230, or SEQ ID NO: 237; or
[0238] b) a leucine at position 24 and/or an asparagine at position 29 of SEQ ID NO: 238.

[0239] Embodiment 107. The antibody of any one of the preceding embodiments, wherein the antibody comprises a wild-type or a variant canine or feline light chain constant region.

[0240] Embodiment 108. The antibody of any one of the preceding embodiments, wherein the antibody comprises a wild-type or a variant canine or feline light chain κ constant region.

[0241] Embodiment 109. The antibody of embodiment 107 or embodiment 108, wherein the variant light chain constant region comprises at least one amino acid modification relative to a wild-type canine or feline light chain κ constant region comprising:
[0242] a) at least one amino acid substitution at a position corresponding to position 11 and/or position 22 of SEQ ID NO: 235; or
[0243] b) at least one amino acid substitution at a position corresponding to position 11 and/or position 22 of SEQ ID NO: 241.

[0244] Embodiment 110. An antibody comprising a variant light chain constant region comprises at least one amino acid modification relative to a wild-type canine or feline light chain κ constant region comprising:
[0245] a) at least one amino acid substitution at a position corresponding to position 11 and/or position 22 of SEQ ID NO: 235; or
[0246] b) at least one amino acid substitution at a position corresponding to position 11 and/or position 22 of SEQ ID NO: 241; and
[0247] wherein the antibody comprises a variant canine or feline IgG Fc polypeptide capable of binding to neonatal Fc receptor (FcRn) with an increased affinity relative to the wild-type Fc polypeptide.

[0248] Embodiment 111. The antibody of any one of embodiments 107 to 110, wherein the variant light chain constant region comprises at least one amino acid modification relative to a wild-type feline or canine light chain κ constant region comprising:
[0249] a) an alanine at a position corresponding to position 11 and/or an arginine at a position corresponding to position 22 of SEQ ID NO: 235; or
[0250] b) an alanine at a position corresponding to position 11 and/or an arginine at a position corresponding to position 22 of SEQ ID NO: 241.

[0251] Embodiment 112. The antibody of any one of embodiments 107 to 111, wherein the variant light chain constant region comprises at least one amino acid modification relative to a wild-type feline or canine light chain κ constant region comprising:
[0252] a) an alanine at position 11 and/or an arginine at position 22 of SEQ ID NO: 235; or
[0253] b) an alanine at position 11 and/or an arginine at position 22 of SEQ ID NO: 241.

[0254] Embodiment 113. The antibody of any one of embodiments 107 to 112, wherein the light chain constant region comprises an amino acid sequence of SEQ ID NO: 235, 236, 241, and/or 242.

[0255] Embodiment 114. The antibody of any one of the preceding embodiments, wherein the antibody is a bispecific antibody.

[0256] Embodiment 115. The antibody of any one of the preceding embodiments, wherein the antibody is a bispecific antibody comprising:
[0257] i) a first variant canine IgG Fc polypeptide comprising at least one amino acid modification relative to a first wild-type canine IgG Fc polypeptide and a second variant canine IgG Fc polypeptide comprising at least one amino acid modification relative to a second wild-type canine IgG Fc polypeptide, wherein:
   [0258] a) the first variant canine IgG Fc polypeptide comprises an amino acid substitution at a position corresponding to position 138 of SEQ ID NO: 162, position 137 of SEQ ID NO: 163, position 137 of SEQ ID NO: 165, or position 138 of SEQ ID NO: 167, and/or
   [0259] b) the second variant canine IgG Fc polypeptide comprises an amino acid substitution at a position corresponding to position 138 and/or position 140 of SEQ ID NO: 162, position 137 and/or position 139 of SEQ ID NO: 163, position 137 and/or position 139 of SEQ ID NO: 165, or position 138 and/or position 140 of SEQ ID NO: 167; or
[0260] ii) a first variant feline IgG Fc polypeptide comprising at least one amino acid modification relative to a first wild-type feline IgG Fc polypeptide and a second variant feline IgG Fc polypeptide comprising at least one amino acid modification relative to a second wild-type feline IgG Fc polypeptide, wherein:
   [0261] a) the first variant feline IgG Fc polypeptide comprises an amino acid substitution at a position corresponding to position 154 of SEQ ID NO: 203, SEQ ID NO: 204, SEQ ID NO: 205, SEQ ID NO: 206, or SEQ ID NO: 207, and/or
   [0262] b) the second variant feline IgG Fc polypeptide comprises an amino acid substitution at a position corresponding to position 154 and/or position 156 of SEQ ID NO: 203, SEQ ID NO: 204, SEQ ID NO: 205, SEQ ID NO: 206, or SEQ ID NO: 207.

[0263] Embodiment 116. An antibody or a bispecific antibody comprising:
[0264] i) a first variant canine IgG Fc polypeptide comprising at least one amino acid modification relative to a first wild-type canine IgG Fc polypeptide and a second variant canine IgG Fc polypeptide comprising at least one amino acid modification relative to a second wild-type canine IgG Fc polypeptide, wherein:
   [0265] a) the first variant canine IgG Fc polypeptide comprises an amino acid substitution at a position corresponding to position 138 of SEQ ID NO: 162, position 137 of SEQ ID NO: 163, position 137 of SEQ ID NO: 165, or position 138 of SEQ ID NO: 167, and/or
   [0266] b) the second variant canine IgG Fc polypeptide comprises an amino acid substitution at a position corresponding to position 138 and/or position 140 of SEQ ID NO: 162, position 137 and/or position 139 of SEQ ID NO: 163, position 137 and/or position 139 of SEQ ID NO: 165, or position 138 and/or position 140 of SEQ ID NO: 167;
[0267] ii) a first variant feline IgG Fc polypeptide comprising at least one amino acid modification relative to a first wild-type feline IgG Fc polypeptide and a second variant feline IgG Fc polypeptide comprising at least one amino acid modification relative to a second wild-type feline IgG Fc polypeptide, wherein:
   [0268] a) the first variant feline IgG Fc polypeptide comprises an amino acid substitution at a position corresponding to position 154 of SEQ ID NO: 203, SEQ ID NO: 204, SEQ ID NO: 205, SEQ ID NO: 206, or SEQ ID NO: 207, and/or
   [0269] b) the second variant feline IgG Fc polypeptide comprises an amino acid substitution at a position corresponding to position 154 and/or position 156 of SEQ ID NO: 203, SEQ ID NO: 204, SEQ ID NO: 205, SEQ ID NO: 206, or SEQ ID NO: 207; or
[0270] iii) a first variant equine IgG Fc polypeptide comprising at least one amino acid modification relative to a first wild-type equine IgG Fc polypeptide and a second variant equine IgG Fc polypeptide comprising at least one amino acid modification relative to a second wild-type equine IgG Fc polypeptide, wherein:
   [0271] a) the first variant equine IgG Fc polypeptide comprises an amino acid substitution at a position corresponding to position 130 of SEQ ID NO: 254, SEQ ID NO: 255, SEQ ID NO: 256, SEQ ID NO: 257, SEQ ID NO: 258, SEQ ID NO: 259, or SEQ ID NO: 260, and/or
   [0272] b) the second variant equine IgG Fc polypeptide comprises an amino acid substitution at a position corresponding to position 130 and/or position 132 of SEQ ID NO: 254, SEQ ID NO: 255, SEQ ID NO: 256, SEQ ID NO: 257, SEQ ID NO: 258, SEQ ID NO: 259, or SEQ ID NO: 260; and
[0273] wherein the antibody comprises a variant canine or feline IgG Fc polypeptide capable of binding to neonatal Fc receptor (FcRn) with an increased affinity relative to the wild-type Fc polypeptide.

[0274] Embodiment 117. The antibody of embodiment 115 or embodiment 116, wherein:
[0275] a) the first variant canine IgG Fc polypeptide comprises a tryptophan at a position corresponding to position 138 of SEQ ID NO: 162, position 137 of SEQ ID NO: 163, position 137 of SEQ ID NO: 165, or position 138 of SEQ ID NO: 167;
[0276] b) the second variant canine IgG Fc polypeptide comprises a serine at a position corresponding to position 138 and/or an alanine at a position corresponding to position 140 of SEQ ID NO: 162, a serine at a position corresponding to position 137 and/or an alanine at a position corresponding to position 139 of SEQ ID NO: 163, a serine at a position corresponding to position 137 and/or an alanine at a position corresponding to position 139 of SEQ ID NO: 165, or a serine at a position corresponding to position 138 and/or an alanine at a position corresponding to position 140 of SEQ ID NO: 167;
[0277] c) the first variant feline IgG Fc polypeptide comprises a tryptophan at a position corresponding to position 154 of SEQ ID NO: 203, SEQ ID NO: 204, SEQ ID NO: 205, SEQ ID NO: 206, or SEQ ID NO: 207;
[0278] d) the second variant feline IgG Fc polypeptide comprises a serine at a position corresponding to position 154 and/or an alanine at a position corresponding to position 156 of SEQ ID NO: 203, SEQ ID NO: 204, SEQ ID NO: 205, SEQ ID NO: 206, or SEQ ID NO: 207;
[0279] e) the first variant equine IgG Fc polypeptide comprises a tryptophan at a position corresponding to position 130 of SEQ ID NO: 254, SEQ ID NO: 255, SEQ ID NO: 256, SEQ ID NO: 257, SEQ ID NO: 258, SEQ ID NO: 259, or SEQ ID NO: 260; and/or
[0280] f) the second variant equine IgG Fc polypeptide comprises a serine at a position corresponding to position 130 and/or an alanine at a position corresponding to position 132 of SEQ ID NO: 254, SEQ ID NO: 255, SEQ ID NO: 256, SEQ ID NO: 257, SEQ ID NO: 258, SEQ ID NO: 259, or SEQ ID NO: 260.

[0281] Embodiment 118. The antibody of any one of embodiments 115 to 117, wherein:
[0282] a) the first variant canine IgG Fc polypeptide comprises an amino acid substitution at position 138 of SEQ ID NO: 162, position 137 of SEQ ID NO: 163, position 137 of SEQ ID NO: 165, or position 138 of SEQ ID NO: 167;
[0283] b) the second variant canine IgG Fc polypeptide comprises an amino acid substitution at position 138 and/or position 140 of SEQ ID NO: 162, an amino acid substitution at position 137 and/or position 139 of SEQ ID NO: 163, an amino acid substitution at position 137 and/or position 139 of SEQ ID NO: 165, or an amino acid substitution at position 138 and/or position 140 of SEQ ID NO: 167;
[0284] c) the first variant feline IgG Fc polypeptide comprises an amino acid substitution at position 154 of SEQ ID NO: 203, SEQ ID NO: 204, SEQ ID NO: 205, SEQ ID NO: 206, or SEQ ID NO: 207;
[0285] d) the second variant feline IgG Fc polypeptide comprises an amino acid substitution at position 154 and/or position 156 of SEQ ID NO: 203, SEQ ID NO: 204, SEQ ID NO: 205, SEQ ID NO: 206, or SEQ ID NO: 207;
[0286] e) the first variant equine IgG Fc polypeptide comprises an amino acid substitution at position 130 of SEQ ID NO: 254, SEQ ID NO: 255, SEQ ID NO: 256, SEQ ID NO: 257, SEQ ID NO: 258, SEQ ID NO: 259, or SEQ ID NO: 260; and/or
[0287] f) the second variant equine IgG Fc polypeptide comprises an amino acid substitution at position 130 and/or position 132 of SEQ ID NO: 254, SEQ ID NO: 255, SEQ ID NO: 256, SEQ ID NO: 257, SEQ ID NO: 258, SEQ ID NO: 259, or SEQ ID NO: 260.

[0288] Embodiment 119. The antibody of any one of embodiments 115 to 118, wherein:
[0289] a) the first variant canine IgG Fc polypeptide comprises a tryptophan at position 138 of SEQ ID NO: 162, position 137 of SEQ ID NO: 163, position 137 of SEQ ID NO: 165, or position 138 of SEQ ID NO: 167;
[0290] b) the second variant canine IgG Fc polypeptide comprises a serine at position 138 and/or an alanine at position 140 of SEQ ID NO: 162, a serine at position 137 and/or an alanine at position 139 of SEQ ID NO: 163, a serine at position 137 and/or an alanine at position 139 of SEQ ID NO: 165, or a serine at position 138 and/or an alanine at position 140 of SEQ ID NO: 167;
[0291] c) the first variant feline IgG Fc polypeptide comprises a tryptophan at position 154 of SEQ ID NO: 203, SEQ ID NO: 204, SEQ ID NO: 205, SEQ ID NO: 206, or SEQ ID NO: 207;
[0292] d) the second variant feline IgG Fc polypeptide comprises a serine at position 154 and/or an alanine at position 156 of SEQ ID NO: 203, SEQ ID NO: 204, SEQ ID NO: 205, SEQ ID NO: 206, or SEQ ID NO: 207;
[0293] e) the first variant equine IgG Fc polypeptide comprises a tryptophan at position 130 of SEQ ID NO: 254, SEQ ID NO: 255, SEQ ID NO: 256, SEQ ID NO: 257, SEQ ID NO: 258, SEQ ID NO: 259, or SEQ ID NO: 260; and/or
[0294] f) the second variant equine IgG Fc polypeptide comprises a serine at position 130 and/or an alanine at position 132 of SEQ ID NO: 254, SEQ ID NO: 255, SEQ ID NO: 256, SEQ ID NO: 257, SEQ ID NO: 258, SEQ ID NO: 259, or SEQ ID NO: 260.

[0295] Embodiment 120. The antibody of any one of embodiments 115 to 119, wherein the first wild-type IgG Fc polypeptide and the second wild-type IgG Fc polypeptide are from the same IgG subtype.

[0296] Embodiment 121. The antibody of any one of embodiments 115 to 117, wherein the first wild-type IgG Fc polypeptide and the second wild-type IgG Fc polypeptide are from a different IgG subtype.

[0297] Embodiment 122. The antibody of any one of the preceding embodiments, wherein the variant Fc polypeptide binds to FcRn with an affinity greater than the wild-type IgG Fc polypeptide, as measured by biolayer interferometry, surface plasmon resonance, or any protein-protein interaction tool at a pH in the range of from about 5.0 to about 6.5, such as at a pH of about 5.0, a pH of about 5.2, a pH of about 5.5, a pH of about 6.0, a pH of about 6.2, or a pH of about 6.5.

[0298] Embodiment 123. The antibody of any one of the preceding embodiments, wherein the variant IgG Fc polypeptide binds to FcRn with a dissociation constant (Kd) of less than 5×10⁻⁶ M, less than 1×10⁻⁶ M, less than 5×10⁻⁷ M, less than 1×10⁻⁷ M, less than 5×10⁻⁸ M, less than 1×10⁻⁸ M, less than 5×10⁻⁹ M, less than 1×10⁻⁹ M, less than 5×10⁻¹⁹ M, less than 1×10⁻¹⁹ M, less than 5×10⁻¹¹ M, less than 1×10⁻¹¹ M, less than 5×10⁻¹² M, or less than 1×10⁻¹² M, as measured by biolayer interferometry, surface plasmon resonance, or any protein-protein interaction tool at a pH in the range of from about 5.0 to about 6.5, such as at a pH of about 5.0, a pH of about 5.5, a pH of about 6.0, or a pH of about 6.5.

[0299] Embodiment 124. The antibody of any one of the preceding embodiments, wherein the antibody has increased serum half-life relative to the antibody with a wild-type IgG Fc polypeptide.

[0300] Embodiment 125. The antibody of any one of the preceding embodiments, wherein the variant IgG Fc polypeptide comprises:
[0301] a) a tyrosine or a phenylalanine at a position corresponding to position 23 of SEQ ID NO: 163;
[0302] b) a tyrosine at a position corresponding to position 82 of SEQ ID NO: 163;
[0303] c) a tyrosine at a position corresponding to position 82 and a histidine at a position corresponding to position 207 of SEQ ID NO: 163;
[0304] d) a tyrosine at a position corresponding to position 82 and a tyrosine at a position corresponding to position 207 of SEQ ID NO: 163; or
[0305] e) a tyrosine at a position corresponding to position 207 of SEQ ID NO: 163.

[0306] Embodiment 126. The antibody of any one of the preceding embodiments, wherein the variant IgG Fc polypeptide comprises:
[0307] a) a tyrosine or a phenylalanine at position 23 of SEQ ID NO: 163;
[0308] b) a tyrosine at position 82 of SEQ ID NO: 163;
[0309] c) a tyrosine at position 82 and a histidine at position 207 of SEQ ID NO: 163;
[0310] d) a tyrosine at position 82 and a tyrosine at position 207 of SEQ ID NO: 163, or
[0311] e) a tyrosine at position 207 of SEQ ID NO: 163.

[0312] Embodiment 127. The antibody of any one of the preceding embodiments, wherein the antibody comprises an IgG Fc polypeptide comprising an amino acid sequence of SEQ ID NO: 162, 163, 164, 165, 166, 167, 168, 169, 170, 171, 172, 173, 174, 175, 176, 177, 178, 179, 180, 181, 182, 183, 184, 185, 186, 187, 188, 189, 190, 191, 192, 193, 194, 195, 196, 197, 198, 199, 200, 201, 202, 203, 204, 205, 206, 207, 208, 209, 210, 211, 212, 213, 214, 215, 216, 217, 218, 219, 220, 221, 222, 223, 224, 225, 226, 227, 228, 229, 230, 231, 232, 233, 234, 237, 238, 239, 240, 254, 255, 256, 257, 258, 259, 260, 261, 262, 263, 264, 265, 266, 267, 381, 382, 383, 384, 385, 386, 387, 388, 389, 390, 391, 392, 393, and/or 394.

[0313] Embodiment 128. The antibody of any one of the preceding embodiments, wherein the antibody comprises:
[0314] a) (i) a heavy chain amino acid sequence of SEQ ID NO: 25 or SEQ ID NO: 47; (ii) a light chain amino acid sequence of SEQ ID NO: 26 or SEQ ID NO: 48; or (iii) a heavy chain amino acid sequence as in (i) and a light chain sequence as in (ii);
[0315] b) (i) a heavy chain amino acid sequence of SEQ ID NO: 51 or SEQ ID NO: 55; (ii) a light chain amino acid sequence of SEQ ID NO: 52 or SEQ ID NO: 56; or (iii) a heavy chain amino acid sequence as in (i) and a light chain sequence as in (ii);
[0316] c) (i) a heavy chain amino acid sequence of SEQ ID NO: 71, SEQ ID NO: 72, SEQ ID NO: 75, SEQ ID NO: 76, SEQ ID NO: 276, SEQ ID NO: 370, SEQ ID NO: 395, SEQ ID NO: 396, SEQ ID NO: 397, SEQ ID NO: 398, SEQ ID NO: 399, SEQ ID NO: 400, SEQ ID NO: 401, SEQ ID NO: 402, SEQ ID NO: 403, SEQ ID NO: 404, SEQ ID NO: 405, SEQ ID NO: 406, SEQ ID NO: 410, SEQ ID NO: 411, SEQ ID NO: 412, SEQ ID NO: 413, SEQ ID NO: 414, SEQ ID NO: 415, SEQ ID NO: 416, SEQ ID NO: 417, SEQ ID NO: 418, SEQ ID NO: 419, SEQ ID NO: 420, or SEQ ID NO: 421; (ii) a light chain amino acid sequence of SEQ ID NO: 73, SEQ ID NO: 74, SEQ ID NO: 77, SEQ ID NO: 78, SEQ ID NO: 277, SEQ ID NO: 371; or (iii) a heavy chain amino acid sequence as in (i) and a light chain sequence as in (ii);
[0317] d) (i) a heavy chain amino acid sequence of SEQ ID NO: 79, SEQ ID NO: 80, SEQ ID NO: 82, SEQ ID NO: 372, SEQ ID NO: 373, SEQ ID NO: 83, SEQ ID NO: 374, or SEQ ID NO: 375; (ii) a light chain amino acid sequence of SEQ ID NO: 81, SEQ ID NO: 84, SEQ ID NO: 376, SEQ ID NO: 377, SEQ ID NO: 378; or (iii) a heavy chain amino acid sequence as in (i) and a light chain sequence as in (ii);
[0318] e) (i) a heavy chain amino acid sequence of SEQ ID NO: 243; (ii) a light chain amino acid sequence of SEQ ID NO: 244; or (iii) a heavy chain amino acid sequence as in (i) and a light chain sequence as in (ii);
[0319] f) (i) a heavy chain amino acid sequence of SEQ ID NO: 348 or SEQ ID NO: 349; (ii) a light chain amino acid sequence of SEQ ID NO: 350; or (iii) a heavy chain amino acid sequence as in (i) and a light chain sequence as in (ii); or
[0320] g) (i) a heavy chain amino acid sequence of SEQ ID NO: 351 or SEQ ID NO: 352; (ii) a light chain amino acid sequence of SEQ ID NO: 253; or (iii) a heavy chain amino acid sequence as in (i) and a light chain sequence as in (ii).

[0321] Embodiment 129. An isolated antibody that binds to canine IL4R or feline IL4R, wherein the antibody comprises a variable light chain amino acid sequence of SEQ ID NO: 408 and/or a light chain amino sequence of SEQ ID NO: 409.

[0322] Embodiment 130. The antibody of any one of the preceding embodiments, wherein the antibody is a bispecific antibody that binds to IL4R and one or more antigens selected from IL17, IL31, TNFα, CD20, CD19, CD25, IL4, IL13, IL23, IgE, CD11α, IL6R, α4-Intergrin, IL12, IL1β, or BlyS.

[0323] Embodiment 131. The antibody of any one of the preceding embodiments, wherein the antibody comprises (i) a heavy chain amino acid sequence of SEQ ID NO: 245; (ii) a light chain amino acid sequence of SEQ ID NO: 246; or (iii) a heavy chain amino acid sequence as in (i) and a light chain sequence as in (ii).

[0324] Embodiment 132. The antibody of any one of the preceding embodiments, wherein the antibody is an antibody fragment, such as an Fv, scFv, Fab, Fab′, F(ab′)2, or Fab′-SH fragment.

[0325] Embodiment 133. An isolated nucleic acid encoding the antibody of any one of the preceding embodiments.

[0326] Embodiment 134. A host cell comprising the nucleic acid of embodiments 133.

[0327] Embodiment 135. A host cell that expresses the antibody of any one of embodiments 1 to 134.

[0328] Embodiment 136. A method of producing an antibody comprising culturing the host cell of embodiment 134 or embodiment 135 and isolating the antibody.

[0329] Embodiment 137. A pharmaceutical composition comprising the antibody of any one of embodiments 1 to 132 and a pharmaceutically acceptable carrier.

[0330] Embodiment 138. A method of treating a companion animal species having an IL4/IL13-induced condition, the method comprising administering to the companion animal species a therapeutically effective amount of the antibody of any one of embodiments 1 to 132 or the pharmaceutical composition of embodiment 137.

[0331] Embodiment 139. The method of embodiment 138, wherein the companion animal species is canine, feline, or equine.

[0332] Embodiment 140. The method of embodiment 138 or embodiment 138, wherein the IL4/IL13-induced condition is a pruritic or allergic condition.

[0333] Embodiment 141. The method of any one of embodiment 138 to 140, wherein the IL4/IL13-induced condition is selected from atopic dermatitis, allergic dermatitis, pruritus, asthma, psoriasis, scleroderma, and eczema.

[0334] Embodiment 142. The method of any one of embodiments 138 to 141, wherein the antibody or the pharmaceutical composition is administered parenterally.

[0335] Embodiment 143. The method of any one of embodiments 138 to 142, wherein the antibody or the pharmaceutical composition is administered by an intramuscular route, an intraperitoneal route, an intracerebrospinal route, a subcutaneous route, an intra-arterial route, an intrasynovial route, an intrathecal route, or an inhalation route.

[0336] Embodiment 144. The method of any one of embodiments 138 to 143, wherein the method comprises administering in combination with the antibody or the pharmaceutical composition a Jak inhibitor, a PI3K inhibitor, an ERK inhibitor.

[0337] Embodiment 145. The method of any one of embodiments 138 to 144, wherein the method comprises administering in combination with the antibody or the pharmaceutical composition one or more antibodies selected from an anti-IL17 antibody, an anti-IL31 antibody, an anti-TNFα antibody, an anti-CD20 antibody, an anti-CD19 antibody, an anti-CD25 antibody, an anti-IL4 antibody, an anti-IL13 antibody, an anti-IL23 antibody, an anti-IgE antibody, an anti-CD11a antibody, anti-IL6R antibody, anti-α4-Intergrin antibody, an anti-IL12 antibody, an anti-IL 1β antibody, and an anti-BlyS antibody.

[0338] Embodiment 146. A method of reducing IL4 and/or IL13 signaling function in a cell, the method comprising exposing to the cell the antibody of any one of embodiments 1 to 132 or the pharmaceutical composition of embodiment 137 under conditions permissive for binding of the antibody to extracellular IL4 and/or IL13, thereby reducing binding of IL4 and/or IL13 to IL4R and/or reducing IL4 and/or IL13 signaling function by the cell.

[0339] Embodiment 147. The method of embodiment 146, wherein the cell is exposed to the antibody or the pharmaceutical composition ex vivo.

[0340] Embodiment 148. The method of embodiment 146, wherein the cell is exposed to the antibody or the pharmaceutical composition in vivo.

[0341] Embodiment 149. The method of any one of embodiment 146 to 148, wherein the cell is a canine cell or a feline cell.

[0342] Embodiment 150. The method of any one of embodiment 146 to 149, wherein the antibody reduces IL4 and/or IL13 signaling function in the cell, as determined by a reduction in STAT6 phosphorylation.

[0343] Embodiment 151. The method of any one of embodiments 146 to 150, wherein the cell is a canine DH82 cell.

[0344] Embodiment 152. A method for detecting IL4R in a sample from a companion animal species comprising contacting the sample with the antibody of any one of embodiments 1 to 132 or the pharmaceutical composition of embodiment 137 under conditions permissive for binding of the antibody to IL4R.

[0345] Embodiment 153. The method of embodiment 152, wherein the sample is a biological sample obtained from a canine or a feline.

### BRIEF DESCRIPTION OF THE DRAWINGS

[0346] FIG. 1 is an alignment of heavy and light chain amino acid sequences of Clone B and Clone I mouse monoclonal antibody clones.

[0347] FIG. 2A and FIG. 2B are graphs of canine IL4R competitive epitope binding analyses with Clone B followed by Clone I (FIG. 2A) and with Clone I followed by Clone B.

[0348] FIGS. 3A, 3B, 3C, and 3D are graphs of canine IL4R competitive binding analyses with Clone B or Clone I followed by canine IL4 (FIG. 3A); with Clone B or Clone I followed by canine IL13 (FIG. 3B); with canine IL4 followed by Clone B or Clone I (FIG. 3C); and with canine IL13 followed by Clone B or Clone I (FIG. 3D).

[0349] FIGS. 4A and 4B are immunoblots of feline, equine, murine, human, and canine IL4R ECD polypeptides probed with Clone I (FIG. 4A) and anti-human Fc antibody as a control (FIG. 4B) under non-reducing (−DTT, left panel) and reducing (+DTT, right panel) conditions.

[0350] FIG. 5A is an illustration of canine/human IL4R ECD hybrid polypeptides used for canine IL4R epitope mapping analyses. FIGS. 5B and 5C are immunoblots of canine IL4R ECD, human IL4R ECD, the various canine/human IL4R ECD hybrid polypeptides illustrated in 5A probed with Clone I (FIG. 5B) and anti-human Fc antibody as a control (FIG. 5C).

[0351] FIG. 6A is an illustration of canine/human IL4R ECD hybrid polypeptides used for additional canine IL4R epitope mapping analyses. FIGS. 6B and 6C are immunoblots of canine IL4R ECD, human IL4R ECD, and the various canine/human IL4R ECD hybrid polypeptides illustrated in 6A probed with Clone I (FIG. 6B) and anti-human Fc antibody as a control (FIG. 6C).

[0352] FIG. 7A identifies canine IL4R ECD alanine mutant polypeptides further described in Table 1, which were used for additional canine IL4R epitope mapping analyses.

[0353] FIGS. 7B and 7C are immunoblots of human IL4R ECD, canine IL4R ECD, and the various canine IL4R ECD alanine mutant polypeptides probed with Clone I (FIG. 7B) and anti-human Fc antibody as a control (FIG. 7C).

[0354] FIG. 8 is a three-dimensional model of a complex of canine IL4, canine IL4R ECD, and canine IL13R ECD. A first epitope is identified by the arrow.

[0355] FIG. 9A is an illustration of canine/human IL4R ECD hybrid polypeptides used for canine IL4R epitope mapping analyses. FIG. 9B summarizes western blotting analysis of canine IL4R ECD, human IL4R ECD, and various canine/human IL4R ECD hybrid polypeptides probed with M3, M8, and M9 antibodies.

[0356] FIG. 10 shows a Biacore sensorgram of various concentrations of canine FcRn (12.5, 25, 50, 100, and 200 nM) binding to wild-type canine IgG-B Fc polypeptide.

[0357] FIG. 11 shows a Biacore sensorgram of various concentrations of canine FcRn (12.5, 25, 50, 100, and 200 nM) binding to variant canine IgG-B Fc polypeptide L(23)Y.

[0358] FIG. 12 shows a Biacore sensorgram of various concentrations of canine FcRn (12.5, 25, 50, 100, and 200 nM) binding to variant canine IgG-B Fc polypeptide L(23)F.

[0359] FIG. 13 shows a Biacore sensorgram of various concentrations of canine FcRn (12.5, 25, 50, 100, and 200 nM) binding to variant canine IgG-B Fc polypeptide L(23)M.

[0360] FIG. 14 shows a Biacore sensorgram of various concentrations of canine FcRn (12.5, 25, 50, 100, and 200 nM) binding to variant canine IgG-B Fc polypeptide YTE.

[0361] FIG. 15 is a OctetRed sensorgram of chimeric variant canine IgG-A Fc F00 antibody (A) and IgG-D Fc F00 antibody (B) binding to canine FcRn compared to that of chimeric variant canine IgG-A Fc without the Phe mutation (C) and IgG-D Fc without the Phe mutation (D).

[0362] FIG. 16 shows the serum pharmacokinetics profiles for chimeric variant canine IgG-A F00 antibody (“IgG-A F00”; n=2) and chimeric variant canine IgG-A without the Phe mutation (“IgG-A”; n=2) after subcutaneous administration to rats at 2 mg/kg.

[0363] FIG. 17 is a OctetRed sensorgram of chimeric antibodies with variant canine IgG-B Fcs (0Y0, 0YH, 0YY, or 00Y) binding to canine FcRn compared to that of chimeric antibody with a wild-type canine IgG-B.

[0364] FIG. 18 is a chart showing percent antibody normalized over time resulting from the in vivo pharmacokinetic study in dog as described in Example 27.

### DESCRIPTION OF CERTAIN SEQUENCES

[0365] Table 1 provides a listing of certain sequences referenced herein.

TABLE 1
Description of the Sequences

| SEQ ID | | DESCRIPTION |
|---|---|---|
| NO: | SEQUENCE | |
| 1 | GYTFTSYVMX1 | CDR-H1 |
| | wherein X₁ is H or N | |
| 2 | YINPX₂NDGTFYX₃GX₄X₅X₆G | CDR-H2 |
| | wherein X₂ is K, A, or N; X₃ is N or A; | |
| | X₄ K or A; X₅ is F or V; and X₆ is K or Q | |
| 268 | YINPX₂NDGT | Alternative CDR-H2 |
| | wherein X₂ is K, A, or N | |
| 3 | FX₇YGX₈AY | CDR-H3 |
| | wherein X₇ is N or Y; and X₈ is I or F | |
| 4 | RASQEISGYLX₉ | CDR-L1 |
| | wherein X₉ is S or A | |
| 5 | AASX₁₀X₁₁DX₁₂ | CDR-L2 |
| | wherein X₁₀ is T or N; X₁₁ is R or L; and | |
| | X₁₂ is S or T | |
| 6 | X₁₃QYASYPWT | CDR-L3 |
| | Wherein X₁₃ is V or L | |
| 7 | GYTFTSYVMH | Clone B CDR-H1 |
| 8 | YINPKNDGTFYNGKFKG | Clone B CDR-H2 |
| 269 | YINPKNDGT | Alternative Clone B |
| | | CDR-H2 |
| 9 | FNYGIAY | Clone B CDR-H3 |
| 10 | EVKLEESGPELVKPGASVKMSCKAS | Clone B HC-FR1 |
| 11 | WVKQKPGQGLEWIG | Clone B HC-FR2 |
| 12 | KATLTSDKSSSTAYMELSSLTSEDSAVYYCAA | Clone B HC-FR3 |
| 270 | FYNGKFKGKATLTSDKSSSTAYMELSSLTSEDSAVYYCA | Alternative Clone B |
| | A | HC-FR3 |
| 13 | WGQGTLVTVSS | Clone B HC-FR4 |
| 14 | RASQEISGYLS | Clone B CDR-L1 |
| 15 | AASTLDS | Clone B CDR-L2 |
| 16 | VQYASYPWT | Clone B CDR-L3 |
| 17 | DIVLTQTPSSLSASLGERVSLTCRAS | Clone B LC-FR1 |
| 18 | WLQQKPDGTIKRLIY | Clone B LC-FR2 |
| 19 | GVPKRFSGSRSGSDFSLTISSLESEDFADYYC | Clone B LC-FR3 |
| 20 | FGGGARLEIK | Clone B LC-FR4 |
| 21 | EVKLEESGPELVKPGASVKMSCKASGYTFTSYVMHWVKQ | Clone B variable HC |
| | KPGQGLEWIGYINPKNDGTFYNGKFKGKATLTSDKSSST | |
| | AYMELSSLTSEDSAVYYCAAFNYGIAYWGQGTLVTVSS | |
| 22 | IVLTQTPSSLSASLGERVSLTCRASQEISGYLSWLQQKP | Clone B variable LC |
| | DGTIKRLIYAASTLDSGVPKRFSGSRSGSDFSLTISSLE | |
| | SEDFADYYCVQYASYPWTFGGGARLEIK | |
| 23 | MAVLGLLLCLVTFPSCVLSEVKLEESGPELVKPGASVKM | Clone B variable HC |
| | SCKASGYTFTSYVMHWVKQKPGQGLEWIGYINPKNDGTF | with leader sequence |
| | YNGKFKGKATLTSDKSSSTAYMELSSLTSEDSAVYYCAA | |
| | FNYGIAYWGQGTLVTVSS | |
| 24 | METDTLLLWVLLLWVPGSTGIVLTQTPSSLSASLGERVS | Clone B variable LC |
| | LTCRASQEISGYLSWLQQKPDGTIKRLIYAASTLDSGVP | with leader sequence |
| | KRFSGSRSGSDFSLTISSLESEDFADYYCVQYASYPWTF | |
| | GGGARLEIK | |
| 25 | EVKLEESGPELVKPGASVKMSCKASGYTFTSYVMHWVKQ | Clone B HC |
| | KPGQGLEWIGYINPKNDGTFYNGKFKGKATLTSDKSSST | |
| | AYMELSSLTSEDSAVYYCAAFNYGIAYWGQGTLVTVSSA | |
| | KTTPPSVYPLAPGSAAQTNSMVTLGCLVKGYFPEPVTVT | |
| | WNSGSLSSGVHTFPAVLQSDLYTLSSSVTVPSSPRPSET | |
| | VTCNVAHPASSTKVDKKIVPRDCGCKPCICTVPEVSSVF | |
| | IFPPKPKDVLTITLTPKVTCVVVDISKDDPEVQFSWFVD | |
| | DVEVHTAQTQPREEQFNSTFRSVSELPIMHQDWLNGKEF | |
| | KCRVNSAAFPAPIEKTISKTKGRPKAPQVYTIPPPKEQM | |
| | AKDKVSLTCMITDFFPEDITVEWQWNGQPAENYKNTQPI | |
| | MNTNGSYFVYSKLNVQKSNWEAGNTFTCSVLHEGLHNHH | |
| | TEKSLSHSPGK | |
| 26 | IVLTQTPSSLSASLGERVSLTCRASQEISGYLSWLQQKP | Clone B LC |
| | DGTIKRLIYAASTLDSGVPKRFSGSRSGSDFSLTISSLE | |
| | SEDFADYYCVQYASYPWTFGGGARLEIKRADAAPTVSIF | |
| | PPSSEQLTSGGASVVCFLNNFYPKDINVKWKIDGSERQN | |
| | GVLNSWTDQDSKDSTYSMSSTLTLTKDEYERHNSYTCEA | |
| | THKTSTSPIVKSFNRNEC | |
| 27 | MAVLGLLLCLVTFPSCVLSEVKLEESGPELVKPGASVKM | Clone B HC with leader |
| | SCKASGYTFTSYVMHWVKQKPGQGLEWIGYINPKNDGTF | sequence |
| | YNGKFKGKATLTSDKSSSTAYMELSSLTSEDSAVYYCAA | |
| | FNYGIAYWGQGTLVTVSSAKTTPPSVYPLAPGSAAQTNS | |
| | MVTLGCLVKGYFPEPVTVTWNSGSLSSGVHTFPAVLQSD | |
| | LYTLSSSVTVPSSPRPSETVTCNVAHPASSTKVDKKIVP | |
| | RDCGCKPCICTVPEVSSVFIFPPKPKDVLTITLTPKVTC | |
| | VVVDISKDDPEVQFSWFVDDVEVHTAQTQPREEQFNSTF | |
| | RSVSELPIMHQDWLNGKEFKCRVNSAAFPAPIEKTISKT | |
| | KGRPKAPQVYTIPPPKEQMAKDKVSLTCMITDFFPEDIT | |
| | VEWQWNGQPAENYKNTQPIMNINGSYFVYSKLNVQKSNW | |
| | EAGNTFTCSVLHEGLHNHHTEKSLSHSPGK | |
| 28 | METDTLLLWVLLLWVPGSTGIVLTQTPSSLSASLGERVS | Clone B LC with leader |
| | LTCRASQEISGYLSWLQQKPDGTIKRLIYAASTLDSGVP | sequence |
| | KRFSGSRSGSDFSLTISSLESEDFADYYCVQYASYPWTF | |
| | GGGARLEIKRADAAPTVSIFPPSSEQLTSGGASVVCFLN | |
| | NFYPKDINVKWKIDGSERQNGVLNSWTDQDSKDSTYSMS | |
| | STLTLTKDEYERHNSYTCEATHKTSTSPIVKSFNRNEC | |
| 29 | GYTFTSYVMH | Clone I CDR-H1 |
| 358 | GYTFTSYVMN | Alternative Clone I |
| | | CDR-H1 |
| 30 | YINPNNDGTFYNGKFKG | Clone I CDR-H2 |
| 271 | YINPNNDGTFYNGKFQG | Alternative Clone I |
| | | CDR-H2 |
| 359 | YINPNNDGTFYADSVKG | Alternative Clone I |
| | | CDR-H2 |
| 272 | YINPNNDGT | Alternative Clone I |
| | | CDR-H2 |
| 31 | FYYGFAY | Clone I CDR-H3 |
| 32 | EVQLQQSGPELVKPGASVKMSCKAS | Clone I HC-FR1 |
| 33 | WVKQKPGQGLEWIG | Clone I HC-FR2 |
| 34 | KATLTSDKSSSTAYMELSSLTSEDSAVYYCAA | Clone I HC-FR3 |
| 273 | FYNGKFKGKATLISDKSSSTAYMELSSLTSEDSAVYYCA | Alternative Clone I HC- |
| | A | FR3 |
| 35 | WGQGTLVTVSA | Clone I HC-FR4 |
| 36 | RASQEISGYLS | Clone I CDR-L1 |
| 360 | RASQEISGYLA | Alternative Clone I |
| | | CDR-L1 |
| 37 | AASTLDS | Clone I CDR-L2 |
| 361 | AASTLQT | Alternative Clone I |
| | | CDR-L2 |
| 362 | AASTLDT | Alternative Clone I |
| | | CDR-L2 |
| 38 | LQYASYPWT | Clone I CDR-L3 |
| 39 | DIVLTQSPSSLSASLGERVSLTCRAS | Clone I LC-FR1 |
| 40 | WLQQKPDGTIKRLIY | Clone I LC-FR2 |
| 41 | GVPKRFSGSRSGSDFSLTISSLESEDFADYYC | Clone I LC-FR3 |
| 42 | FGGGAKLEIK | Clone I LC-FR4 |
| 43 | EVQLQQSGPELVKPGASVKMSCKASGYTFTSYVMHWVKQ | Clone I variable HC |
| | KPGQGLEWIGYINPNNDGTFYNGKFKGKATLTSDKSSST | |
| | AYMELSSLTSEDSAVYYCAAFYYGFAYWGQGTLVTVSA | |
| 44 | DIVLTQSPSSLSASLGERVSLTCRASQEISGYLSWLQQK | Clone I variable LC |
| | PDGTIKRLIYAASTLDSGVPKRFSGSRSGSDFSLTISSL | |
| | ESEDFADYYCLQYASYPWTFGGGAKLEIK | |
| 45 | MAVLGLLLCLVTFPSCVLSEVQLQQSGPELVKPGASVKM | Clone I variable HC |
| | SCKASGYTFTSYVMHWVKQKPGQGLEWIGYINPNNDGTF | with leader sequence |
| | YNGKFKGKATLTSDKSSSTAYMELSSLTSEDSAVYYCAA | |
| | FYYGFAYWGQGTLVTVSA | |
| 46 | METDTLLLWVLLLWVPGSTGDIVLTQSPSSLSASLGERV | Clone I variable LC with |
| | SLTCRASQEISGYLSWLQQKPDGTIKRLIYAASTLDSGV | leader sequence |
| | PKRFSGSRSGSDFSLTISSLESEDFADYYCLQYASYPWT | |
| | FGGGAKLEIK | |
| 47 | EVQLQQSGPELVKPGASVKMSCKASGYTFTSYVMHWVKQ | Clone I HC |
| | KPGQGLEWIGYINPNNDGTFYNGKFKGKATLTSDKSSST | |
| | AYMELSSLTSEDSAVYYCAAFYYGFAYWGQGTLVTVSAA | |
| | KTTPPSVYPLAPGSAAQTNSMVTLGCLVKGYFPEPVTVT | |
| | WNSGSLSSGVHTFPAVLQSDLYTLSSSVTVPSSPRPSET | |
| | VTCNVAHPASSTKVDKKIVPRDCGCKPCICTVPEVSSVF | |
| | IFPPKPKDVLTITLTPKVTCVVVDISKDDPEVQFSWFVD | |
| | DVEVHTAQTQPREEQFNSTFRSVSELPIMHQDWLNGKEF | |
| | KCRVNSAAFPAPIEKTISKTKGRPKAPQVYTIPPPKEQM | |
| | AKDKVSLTCMITDFFPEDITVEWQWNGQPAENYKNTQPI | |
| | MNTNGSYFVYSKLNVQKSNWEAGNTFTCSVLHEGLHNHH | |
| | TEKSLSHSPGK | |
| 48 | DIVLTQSPSSLSASLGERVSLTCRASQEISGYLSWLQQK | Clone ILC |
| | PDGTIKRLIYAASTLDSGVPKRFSGSRSGSDFSLTISSL | |
| | ESEDFADYYCLQYASYPWTFGGGAKLEIKRADAAPTVSI | |
| | FPPSSEQLTSGGASVVCFLNNFYPKDINVKWKIDGSERQ | |
| | NGVLNSWTDQDSKDSTYSMSSTLTLTKDEYERHNSYTCE | |
| | ATHKTSTSPIVKSFNRNEC | |
| 49 | MAVLGLLLCLVTFPSCVLSEVQLQQSGPELVKPGASVKM | Clone I HC with leader |
| | SCKASGYTFTSYVMHWVKQKPGQGLEWIGYINPNNDGTF | sequence |
| | YNGKFKGKATLTSDKSSSTAYMELSSLTSEDSAVYYCAA | |
| | FYYGFAYWGQGTLVTVSAAKTTPPSVYPLAPGSAAQTNS | |
| | MVTLGCLVKGYFPEPVTVTWNSGSLSSGVHTFPAVLQSD | |
| | LYTLSSSVTVPSSPRPSETVTCNVAHPASSTKVDKKIVP | |
| | RDCGCKPCICTVPEVSSVFIFPPKPKDVLTITLTPKVTC | |
| | VVVDISKDDPEVQFSWFVDDVEVHTAQTQPREEQFNSTF | |
| | RSVSELPIMHQDWLNGKEFKCRVNSAAFPAPIEKTISKT | |
| | KGRPKAPQVYTIPPPKEQMAKDKVSLTCMITDFFPEDIT | |
| | VEWQWNGQPAENYKNTQPIMNINGSYFVYSKLNVQKSNW | |
| | EAGNTFTCSVLHEGLHNHHTEKSLSHSPGK | |
| 50 | METDTLLLWVLLLWVPGSTGDIVLTQSPSSLSASLGERV | Clone I LC with leader |
| | SLTCRASQEISGYLSWLQQKPDGTIKRLIYAASTLDSGV | sequence |
| | PKRFSGSRSGSDFSLTISSLESEDFADYYCLQYASYPWT | |
| | FGGGAKLEIKRADAAPTVSIFPPSSEQLTSGGASVVCFL | |
| | NNFYPKDINVKWKIDGSERQNGVLNSWTDQDSKDSTYSM | |
| | SSTLTLTKDEYERHNSYTCEATHKTSTSPIVKSENRNEC | |
| 51 | EVKLEESGPELVKPGASVKMSCKASGYTFTSYVMHWVKQ | Chimeric Clone B |
| | KPGQGLEWIGYINPKNDGTFYNGKFKGKATLTSDKSSST | variable HC and canine |
| | AYMELSSLTSEDSAVYYCAAFNYGIAYWGQGTLVTVSSA | IgG-B |
| | STTAPSVFPLAPSCGSTSGSTVALACLVSGYFPEPVTVS | (Chimeric B HC) |
| | WNSGSLTSGVHTFPSVLQSSGLYSLSSMVTVPSSRWPSE | |
| | TFTCNVAHPASKTKVDKPVPKRENGRVPRPPDCPKCPAP | |
| | EMLGGPSVFIFPPKPKDTLLIARTPEVTCVVVDLDPEDP | |
| | EVQISWFVDGKQMQTAKTQPREEQFNGTYRVVSVLPIGH | |
| | QDWLKGKQFTCKVNNKALPSPIERTISKARGQAHQPSVY | |
| | VLPPSREELSKNTVSLTCLIKDFFPPDIDVEWQSNGQQE | |
| | PESKYRTTPPQLDEDGSYFLYSKLSVDKSRWQRGDIFIC | |
| | AVMHEALHNHYTQESLSHSPGK | |
| 52 | IVLTQTPSSLSASLGERVSLTCRASQEISGYLSWLQQKP | Chimeric Clone B |
| | DGTIKRLIYAASTLDSGVPKRFSGSRSGSDFSLTISSLE | variable LC and canine κ |
| | SEDFADYYCVQYASYPWTFGGGARLEIKRNDAQPAVYLF | light constant region |
| | QPSPDQLHTGSASVVCLLNSFYPKDINVKWKVDGVIQDT | (Chimeric B LC) |
| | GIQESVTEQDKDSTYSLSSTLTMSSTEYLSHELYSCEIT | |
| | HKSLPSTLIKSFQRSECQRVD | |
| 53 | MAVLGLLLCLVTFPSCVLSEVKLEESGPELVKPGASVKM | Chimeric Clone B |
| | SCKASGYTFTSYVMHWVKQKPGQGLEWIGYINPKNDGTF | variable HC and canine |
| | YNGKFKGKATLTSDKSSSTAYMELSSLTSEDSAVYYCAA | IgG-B with leader |
| | FNYGIAYWGQGTLVTVSSASTTAPSVFPLAPSCGSTSGS | sequence |
| | TVALACLVSGYFPEPVTVSWNSGSLTSGVHTFPSVLQSS | |
| | GLYSLSSMVTVPSSRWPSETFTCNVAHPASKTKVDKPVP | |
| | KRENGRVPRPPDCPKCPAPEMLGGPSVFIFPPKPKDILL | |
| | IARTPEVTCVVVDLDPEDPEVQISWFVDGKQMQTAKTQP | |
| | REEQFNGTYRVVSVLPIGHQDWLKGKQFTCKVNNKALPS | |
| | PIERTISKARGQAHQPSVYVLPPSREELSKNTVSLTCLI | |
| | KDFFPPDIDVEWQSNGQQEPESKYRTTPPQLDEDGSYFL | |
| | YSKLSVDKSRWQRGDTFICAVMHEALHNHYTQESLSHSP | |
| | GK | |
| 54 | METDTLLLWVLLLWVPGSTGIVLTQTPSSLSASLGERVS | Chimeric Clone B |
| | LTCRASQEISGYLSWLQQKPDGTIKRLIYAASTLDSGVP | variable LC and canine κ |
| | KRFSGSRSGSDFSLTISSLESEDFADYYCVQYASYPWTF | light constant region |
| | GGGARLEIKRNDAQPAVYLFQPSPDQLHTGSASVVCLLN | with leader sequence |
| | SFYPKDINVKWKVDGVIQDTGIQESVTEQDKDSTYSLSS | |
| | TLTMSSTEYLSHELYSCEITHKSLPSTLIKSFQRSECQR | |
| | VD | |
| 55 | EVQLQQSGPELVKPGASVKMSCKASGYTFTSYVMHWVKQ | Chimeric Clone I |
| | KPGQGLEWIGYINPNNDGTFYNGKFKGKATLTSDKSSST | variable HC and canine |
| | AYMELSSLTSEDSAVYYCAAFYYGFAYWGQGTLVTVSAA | IgG-B |
| | STTAPSVFPLAPSCGSTSGSTVALACLVSGYFPEPVTVS | (Chimeric I HC) |
| | WNSGSLTSGVHTFPSVLQSSGLYSLSSMVTVPSSRWPSE | |
| | TFTCNVAHPASKTKVDKPVPKRENGRVPRPPDCPKCPAP | |
| | EMLGGPSVFIFPPKPKDTLLIARTPEVTCVVVDLDPEDP | |
| | EVQISWFVDGKQMQTAKTQPREEQFNGTYRVVSVLPIGH | |
| | QDWLKGKQFTCKVNNKALPSPIERTISKARGQAHQPSVY | |
| | VLPPSREELSKNTVSLTCLIKDFFPPDIDVEWQSNGQQE | |
| | PESKYRTTPPQLDEDGSYFLYSKLSVDKSRWQRGDTFIC | |
| | AVMHEALHNHYTQESLSHSPGK | |
| 56 | DIVLTQSPSSLSASLGERVSLTCRASQEISGYLSWLQQK | Chimeric Clone I |
| | PDGTIKRLIYAASTLDSGVPKRFSGSRSGSDFSLTISSL | variable LC and canine κ |
| | ESEDFADYYCLQYASYPWTFGGGAKLEIKRNDAQPAVYL | light constant region |
| | FQPSPDQLHTGSASVVCLLNSFYPKDINVKWKVDGVIQD | (Chimeric I LC) |
| | TGIQESVTEQDKDSTYSLSSTLTMSSTEYLSHELYSCEI | |
| | THKSLPSTLIKSFQRSECQRVD | |
| 57 | MAVLGLLLCLVTFPSCVLSEVQLQQSGPELVKPGASVKM | Chimeric Clone I |
| | SCKASGYTFTSYVMHWVKQKPGQGLEWIGYINPNNDGTF | variable HC and canine |
| | YNGKFKGKATLTSDKSSSTAYMELSSLTSEDSAVYYCAA | IgG-B with leader |
| | FYYGFAYWGQGTLVTVSAASTTAPSVFPLAPSCGSTSGS | sequence |
| | TVALACLVSGYFPEPVTVSWNSGSLTSGVHTFPSVLQSS | |
| | GLYSLSSMVTVPSSRWPSETFTCNVAHPASKTKVDKPVP | |
| | KRENGRVPRPPDCPKCPAPEMLGGPSVFIFPPKPKDTLL | |
| | IARTPEVTCVVVDLDPEDPEVQISWFVDGKQMQTAKTQP | |
| | REEQFNGTYRVVSVLPIGHQDWLKGKQFTCKVNNKALPS | |
| | PIERTISKARGQAHQPSVYVLPPSREELSKNTVSLTCLI | |
| | KDFFPPDIDVEWQSNGQQEPESKYRTTPPQLDEDGSYFL | |
| | YSKLSVDKSRWQRGDTFICAVMHEALHNHYTQESLSHSP | |
| | GK | |
| 58 | METDTLLLWVLLLWVPGSTGDIVLTQSPSSLSASLGERV | Chimeric Clone I |
| | SLTCRASQEISGYLSWLQQKPDGTIKRLIYAASTLDSGV | variable LC and canine κ |
| | PKRFSGSRSGSDFSLTISSLESEDFADYYCLQYASYPWT | light constant region |
| | FGGGAKLEIKRNDAQPAVYLFQPSPDQLHTGSASVVCLL | with leader sequence |
| | NSFYPKDINVKWKVDGVIQDTGIQESVTEQDKDSTYSLS | |
| | STLTMSSTEYLSHELYSCEITHKSLPSTLIKSFQRSECQ | |
| | RVD | |
| 59 | EVQLVESGGDLVKPGGSLRLSCKASGYTFTSYVMHWVRQ | Caninized Clone B |
| | APGQGLEWVAYINPKNDGTFYNGAVKGRFTISRDNARNT | variable HC v1 |
| | LYLQMNSLRSEDTAVYYCAAFNYGIAYWGQGTLVTVSS | |
| 60 | EVQLVQSGAEVKKPGASVKVSCKASGYTFTSYVMHWVRQ | Caninized Clone B |
| | APGQGLEWMGYINPKNDGTFYNGKFQGRVTLTADTSTST | variable HC v2 |
| | AYMELSSLRAGDIAVYYCAAFNYGIAYWGQGTLVTVSS | |
| 61 | EIVMTQSPASLSLSQEEKVTITCRASQEISGYLSWLQQK | Caninized Clone B |
| | PGGTIKRLIYAASNRDTGVPSRFSGSGSGTDFSFTISSL | variable LC v1 |
| | EPEDVAVYYCVQYASYPWTFGGGAKLEIK | |
| 62 | DIVMTQTPLSLSVSPGETASISCRASQEISGYLSWLQQK | Caninized Clone B |
| | PGGTIKRLIYAASNRDTGVPDRFSGSGSGTDFTLRISRV | variable LC v2 |
| | EADDTGVYYCVQYASYPWTFGGGTKVELK | |
| 63 | EVQLVESGGDLVKPGGSLRLSCKASGYTFTSYVMHWVRQ | Caninized Clone I |
| | APGQGLEWVAYINPNNDGTFYNGAVKGRFTISRDNARNT | variable HC v1 |
| | LYLQMNSLRSEDTAVYYCAAFYYGFAYWGQGTLVTVSS | |
| 64 | EVQLVQSGAEVKKPGASVKVSCKASGYTFTSYVMHWVRQ | Caninized Clone I |
| | APGQGLEWMGYINPNNDGTFYNGKFQGRVTLTADTSTST | variable HC v2 |
| | AYMELSSLRAGDIAVYYCAAFYYGFAYWGQGTLVTVSS | |
| 274 | EVQLVQSAAEVKKPGASVKVSCKASGYTFTSYVMHWVRQ | Caninized Clone I |
| | APGQGLEWIGYINPNNDGTFYNGKFQGRVTLTADTSTGT | variable HC v3 |
| | TYTELSSLRAEDTAVYYCAAFYYGFAYWGQGTLVTVSS | |
| 363 | EVQLVQSGAEVKKPGASVKVSCKASGYTFTSYVMHWVRQ | Caninized Clone I |
| | APGQGLEWMGYINPNNDGTFYNGKFQGRVTLTADTSTST | variable HC v4 |
| | AYMELSSLRAGDIAVYYCAAFYYGFAYWGQGTLVTVSS | |
| 65 | EIVMTQSPASLSLSQEEKVTITCRASQEISGYLSWLQQK | Caninized Clone I |
| | PGGTIKRLIYAASNRDTGVPSRFSGSGSGTDFSFTISSL | variable LC v1 |
| | EPEDVAVYYCLQYASYPWTFGGGAKLEIK | |
| 66 | DIVMTQTPLSLSVSPGETASISCRASQEISGYLSWLQQK | Caninized Clone I |
| | PGGTIKRLIYAASNRDTGVPDRFSGSGSGTDFTLRISRV | variable LC v2 |
| | EADDTGVYYCLQYASYPWTFGGGTKVELK | |
| 275 | DIVMTQTPLSLSVSPGETASISCRASQEISGYLSWLQQK | Caninized Clone I |
| | PDGTIKRLIYAASTLDSGVPDRFSGSGSGTDFTLRISRV | variable LC v3 |
| | EADDTGVYYCLQYASYPWTFGAGTKVELK | |
| 364 | DIVMTQTPLSLSVSPGETASISCRASQEISGYLSWLQQK | Caninized Clone I |
| | PGGTIKRLIYAASTLDSGVPDRFSGSRSGTDFTLRISRV | variable LC v4 |
| | EADDTGVYYCLQYASYPWTFGGGTKVELK | |
| 67 | QVLLVQSGAEVRKPGASVKIFCKASGYTFTSYVMHWLRQ | Felinized Clone B |
| | APAQGLEWMGYINPKNDGTFYNGKFQGRLTLTADTSTNT | variable HC |
| | AYMELSSLRSADTAVYYCAAFNYGIAYWGQGTLVTVSS | |
| 68 | DITMTQSPGSLAGSPGQQVTMNCRASQEISGYLSWLQQK | Felinized Clone B |
| | PGGTIKRLIYAASTLDSGVPDRFSGSGSGTDFTLTISNL | variable LC |
| | QAEDVASYYCVQYASYPWTFGGGTKLEIK | |
| 69 | QVLLVQSGAEVRKPGASVKIFCKASGYTFTSYVMHWLRQ | Felinized Clone I |
| | APAQGLEWMGYINPNNDGTFYNGKFQGRLTLTADTSTNT | variable HC v1 |
| | AYMELSSLRSADTAVYYCAAFYYGFAYWGQGTLVTVSS | |
| 365 | DVQLVESGGDLVKPGGSLRLTCKASGYTFTSYVMNWVRQ | Felinized Clone I |
| | APKQGLQWVAYINPNNDGTFYADSVKGRFTISRDNAKNT | variable HC v2 |
| | LYLQMNSLKTEDTATYYCAAFYYGFAYWGQGTLVTVSS | |
| 366 | DVQLVESGGDLVKPGGSLRLTCKASGYTFTSYVMHWVKQ | Felinized Clone I |
| | KPGQGLEWIGYINPNNDGTFYNGKFKGRFTISRDNAKNT | variable HC v3 |
| | LYLQMNSLKTEDTATYYCAAFYYGFAYWGQGTLVTVSS | |
| 70 | DITMTQSPGSLAGSPGQQVTMNCRASQEISGYLSWLQQK | Felinized Clone I |
| | PGGTIKRLIYAASTLDSGVPDRFSGSGSGTDFTLTISNL | variable LC v1 |
| | QAEDVASYYCLQYASYPWTFGGGTKLEIK | |
| 367 | EIQMTQSPSSLSASPGDRVTITCRASQEISGYLAWYQQK | Felinized Clone I |
| | PGKVPKLLIYAASTLQTGVPSRFSGSGSGTDFTLTISSL | variable LC v2 |
| | EPEDAATYYCLQYASYPWTFGQGTKLEIK | |
| 368 | EIQMTQSPSSLSASPGDRVTITCRASQEISGYLSWLQQK | Felinized Clone I |
| | PDGTIKRLIYAASTLDTGVPSRFSGSGSGTDFTLTISSL | variable LC v3 |
| | EPEDAATYYCLQYASYPWTFGQGTKLEIK | |
| 369 | EITMTQSPGSLAGSPGQQVTMNCRASQEISGYLSWLQQK | Felinized Clone I |
| | PDGTIKRLIYAASTLDSGVPDRFSGSGSGTDFTLTISNL | variable LC v4 |
| | QAEDVASYYCLQYASYPWTFGQGTKLEIK | |
| 71 | EVQLVESGGDLVKPGGSLRLSCKASGYTFTSYVMHWVRQ | Caninized Clone B |
| | APGQGLEWVAYINPKNDGTFYNGAVKGRFTISRDNARNT | variable HC v1 and |
| | LYLQMNSLRSEDTAVYYCAAFNYGIAYWGQGTLVTVSSA | variant canine IgG-B |
| | STTAPSVFPLAPSCGSTSGSTVALACLVSGYFPEPVTVS | Clq−, CD16− |
| | WNSGSLTSGVHTFPSVLQSSGLYSLSSMVTVPSSRWPSE | |
| | TFTCNVAHPASKTKVDKPVPKRENGRVPRPPDCPKCPAP | |
| | EPLGGPSVFIFPPKPKDTLLIARTPEVTCVVVDLDREDP | |
| | EVQISWFVDGKQMQTAKTQPREEQFNGTYRVVSVLPIGH | |
| | QDWLKGKQFTCRVNNKALPSPIERTISKARGQAHQPSVY | |
| | VLPPSREELSKNTVSLTCLIKDFFPPDIDVEWQSNGQQE | |
| | PESKYRTTPPQLDEDGSYFLYSKLSVDKSRWQRGDTFIC | |
| | AVMHEALHNHYTQESLSHSPGK | |
| 72 | EVQLVQSGAEVKKPGASVKVSCKASGYTFTSYVMHWVRQ | Caninized Clone B |
| | APGQGLEWMGYINPKNDGTFYNGKFQGRVTLTADTSTST | variable HC v2 and |
| | AYMELSSLRAGDIAVYYCAAFNYGIAYWGQGTLVTVSSA | variant canine IgG-B |
| | STTAPSVFPLAPSCGSTSGSTVALACLVSGYFPEPVTVS | Clq−, CD16− |
| | WNSGSLTSGVHTFPSVLQSSGLYSLSSMVTVPSSRWPSE | |
| | TFTCNVAHPASKTKVDKPVPKRENGRVPRPPDCPKCPAP | |
| | EPLGGPSVFIFPPKPKDTLLIARTPEVTCVVVDLDREDP | |
| | EVQISWFVDGKQMQTAKTQPREEQFNGTYRVVSVLPIGH | |
| | QDWLKGKQFTCRVNNKALPSPIERTISKARGQAHQPSVY | |
| | VLPPSREELSKNTVSLTCLIKDFFPPDIDVEWQSNGQQE | |
| | PESKYRTTPPQLDEDGSYFLYSKLSVDKSRWQRGDTFIC | |
| | AVMHEALHNHYTQESLSHSPGK | |
| 73 | EIVMTQSPASLSLSQEEKVTITCRASQEISGYLSWLQQK | Caninized Clone B |
| | PGGTIKRLIYAASNRDTGVPSRFSGSGSGTDFSFTISSL | variable LC v1 and |
| | EPEDVAVYYCVQYASYPWTFGGGAKLEIKRNDAQPAVYL | canine κ light constant |
| | FQPSPDQLHTGSASVVCLLNSFYPKDINVKWKVDGVIQD | region |
| | TGIQESVTEQDKDSTYSLSSTLTMSSTEYLSHELYSCEI | |
| | THKSLPSTLIKSFQRSECQRVD | |
| 74 | DIVMTQTPLSLSVSPGETASISCRASQEISGYLSWLQQK | Caninized Clone B |
| | PGGTIKRLIYAASNRDTGVPDRFSGSGSGTDFTLRISRV | variable LC v2 and |
| | EADDTGVYYCVQYASYPWTFGGGTKVELKRNDAQPAVYL | canine κ light constant |
| | FQPSPDQLHTGSASVVCLLNSFYPKDINVKWKVDGVIQD | region |
| | TGIQESVTEQDKDSTYSLSSTLTMSSTEYLSHELYSCEI | |
| | THKSLPSTLIKSFQRSECQRVD | |
| 75 | EVQLVESGGDLVKPGGSLRLSCKASGYTFTSYVMHWVRQ | Caninized Clone I |
| | APGQGLEWVAYINPNNDGTFYNGAVKGRFTISRDNARNT | variable HC v1 and |
| | LYLQMNSLRSEDTAVYYCAAFYYGFAYWGQGTLVTVSSA | variant canine IgG-B |
| | STTAPSVEPLAPSCGSTSGSTVALACLVSGYFPEPVTVS | C1q−, CD16− |
| | WNSGSLTSGVHTFPSVLQSSGLYSLSSMVTVPSSRWPSE | |
| | TFTCNVAHPASKTKVDKPVPKRENGRVPRPPDCPKCPAP | |
| | EPLGGPSVFIFPPKPKDTLLIARTPEVTCVVVDLDREDP | |
| | EVQISWFVDGKQMQTAKTQPREEQFNGTYRVVSVLPIGH | |
| | QDWLKGKQFTCRVNNKALPSPIERTISKARGQAHQPSVY | |
| | VLPPSREELSKNTVSLTCLIKDFFPPDIDVEWQSNGQQE | |
| | PESKYRTTPPQLDEDGSYFLYSKLSVDKSRWQRGDTFIC | |
| | AVMHEALHNHYTQESLSHSPGK | |
| 76 | EVQLVQSGAEVKKPGASVKVSCKASGYTFTSYVMHWVRQ | Caninized Clone I |
| | APGQGLEWMGYINPNNDGTFYNGKFQGRVTLTADTSTST | variable HC v2 and |
| | AYMELSSLRAGDIAVYYCAAFYYGFAYWGQGTLVTVSSA | variant canine IgG-B |
| | STTAPSVFPLAPSCGSTSGSTVALACLVSGYFPEPVTVS | C1q−, CD16− |
| | WNSGSLTSGVHTFPSVLQSSGLYSLSSMVTVPSSRWPSE | |
| | TFTCNVAHPASKTKVDKPVPKRENGRVPRPPDCPKCPAP | |
| | EPLGGPSVFIFPPKPKDTLLIARTPEVTCVVVDLDREDP | |
| | EVQISWFVDGKQMQTAKTQPREEQFNGTYRVVSVLPIGH | |
| | QDWLKGKQFTCRVNNKALPSPIERTISKARGQAHQPSVY | |
| | VLPPSREELSKNTVSLTCLIKDFFPPDIDVEWQSNGQQE | |
| | PESKYRTTPPQLDEDGSYFLYSKLSVDKSRWQRGDTFIC | |
| | AVMHEALHNHYTQESLSHSPGK | |
| 276 | EVQLVQSAAEVKKPGASVKVSCKASGYTFTSYVMHWVRQAPGQ | Caninized Clone I |
| | GLEWIGYINPNNDGTFYNGKFQGRVTLTADTSTGTTYTELSSL | variable HC v3 and |
| | RAEDTAVYYCAAFYYGFAYWGQGTLVTVSSASTTAPSVFPLAP | variant canine IgG-B |
| | SCGSTSGSTVALACLVSGYFPEPVTVSWNSGSLTSGVHTFPSV | C1q−, CD16− |
| | LQSSGLYSLSSMVTVPSSRWPSETFTCNVAHPASKTKVDKPVP | |
| | KRENGRVPRPPDCPKCPAPEPLGGPSVFIFPPKPKDTLLIART | |
| | PEVTCVVVDLDREDPEVQISWFVDGKQMQTAKTQPREEQFNGT | |
| | YRVVSVLPIGHQDWLKGKQFTCRVNNKALPSPIERTISKARGQ | |
| | AHQPSVYVLPPSREELSKNTVSLTCLIKDFFPPDIDVEWQSNG | |
| | QQEPESKYRTTPPQLDEDGSYFLYSKLSVDKSRWQRGDTFICA | |
| | VMHEALHNHYTQESLSHSPGK | |
| 370 | EVQLVQSGAEVKKPGASVKVSCKASGYTFTSYVMHWVRQAPGQ | Caninized Clone I |
| | GLEWMGYINPNNDGTFYNGKFQGRVTLTADTSTSTAYMELSSL | variable HC v4 and |
| | RAGDIAVYYCAAFYYGFAYWGQGTLVTVSSASTTAPSVFPLAP | variant canine IgG-B |
| | SCGSTSGSTVALACLVSGYFPEPVTVSWNSGSLTSGVHTFPSV | C1q−, CD16− |
| | LQSSGLYSLSSMVTVPSSRWPSETFTCNVAHPASKTKVDKPVP | |
| | KRENGRVPRPPDCPKCPAPEMLGGPSVFIFPPKPKDTLLIART | |
| | PEVTCVVVDLDPEDPEVQISWFVDGKQMQTAKTQPREEQFNGT | |
| | YRVVSVLPIGHQDWLKGKQFTCRVNNIGLPSPIERTISKARGQ | |
| | AHQPSVYVLPPSREELSKNTVSLTCLIKDFFPPDIDVEWQSNG | |
| | QQEPESKYRTTPPQLDEDGSYFLYSKLSVDKSRWQRGDTFICA | |
| | VMHEALHNHYTQESLSHSPGK | |
| 77 | EIVMTQSPASLSLSQEEKVTITCRASQEISGYLSWLQQK | Caninized Clone I |
| | PGGTIKRLIYAASNRDTGVPSRFSGSGSGTDFSFTISSL | variable LC v1 and |
| | EPEDVAVYYCLQYASYPWTFGGGAKLEIKRNDAQPAVYL | canine κ light constant |
| | FQPSPDQLHTGSASVVCLLNSFYPKDINVKWKVDGVIQD | region |
| | TGIQESVTEQDKDSTYSLSSTLTMSSTEYLSHELYSCEI | |
| | THKSLPSTLIKSFQRSECQRVD | |
| 78 | DIVMTQTPLSLSVSPGETASISCRASQEISGYLSWLQQK | Caninized Clone I |
| | PGGTIKRLIYAASNRDTGVPDRFSGSGSGTDFTLRISRV | variable LC v2 and |
| | EADDTGVYYCLQYASYPWTFGGGTKVELKRNDAQPAVYL | canine κ light constant |
| | FQPSPDQLHTGSASVVCLLNSFYPKDINVKWKVDGVIQD | region |
| | TGIQESVTEQDKDSTYSLSSTLTMSSTEYLSHELYSCEI | |
| | THKSLPSTLIKSFQRSECQRVD | |
| 277 | DIVMTQTPLSLSVSPGETASISCRASQEISGYLSWLQQK | Caninized Clone I |
| | PDGTIKRLIYAASTLDSGVPDRFSGSGSGTDFTLRISRV | variable LC v3 and |
| | EADDTGVYYCLQYASYPWTFGAGTKVELKRNDAQPAVYL | canine κ light constant |
| | FQPSPDQLHTGSASVVCLLNSFYPKDINVKWKVDGVIQD | region |
| | TGIQESVTEQDKDSTYSLSSTLTMSSTEYLSHELYSCEI | |
| | THKSLPSTLIKSFQRSECQRVD | |
| 371 | MSVPTQVLGLLLLWLTDARCDIVMTQTPLSLSVSPGETA | Caninized Clone I |
| | SISCRASQEISGYLSWLQQKPGGTIKRLIYAASTLDSGV | variable LC v4 and |
| | PDRFSGSRSGTDFTLRISRVEADDTGVYYCLQYASYPWT | canine κ light constant |
| | FGGGTKVELKRNDAQPAVYLFQPSPDQLHTGSASVVCLL | region |
| | NSFYPKDINVKWKVDGVIQDIGIQESVTEQDKDSTYSLS | |
| | STLTMSSTEYLSHELYSCEITHKSLPSTLIKSFQRSECQ | |
| | RVD | |
| 79 | QVLLVQSGAEVRKPGASVKIFCKASGYTFTSYVMHWLRQ | Felinized Clone B |
| | APAQGLEWMGYINPKNDGTFYNGKFQGRLTLTADTSTNT | variable HC and variant |
| | AYMELSSLRSADTAVYYCAAFNYGIAYWGQGTLVTVSSA | feline IgG2 with hinge |
| | STTASSVFPLAPSCGTTSGATVALACLVLGYFPEPVTVS | Cys modification |
| | WNSGALTSGVHTFPSVLQASGLYSLSSMVTVPSSRWLSD | |
| | TFTCNVAHRPSSTKVDKTVPKTASTIESKTGECPKCPVP | |
| | EIPGAPSVFIFPPKPKDILSISRTPEVTCLVVDLGPDDS | |
| | NVQITWFVDNTEMHTAKTRPREEQFNSTYRVVSVLPILH | |
| | QDWLKGKEFKCKVNSKSLPSAMERTISKAKGQPHEPQVY | |
| | VLPPTQEELSENKVSVTCLIKGFHPPDIAVEWEITGQPE | |
| | PENNYQTTPPQLDSDGTYFLYSRLSVDRSHWQRGNTYTC | |
| | SVSHEALHSHHTQKSLTQSPGK | |
| 80 | QVLLVQSGAEVRKPGASVKIFCKASGYTFTSYVMHWLRQ | Felinized Clone B |
| | APAQGLEWMGYINPKNDGTFYNGKFQGRLTLTADTSTNT | variable HC and variant |
| | AYMELSSLRSADTAVYYCAAFNYGIAYWGQGTLVTVSSA | feline IgG2 with feline |
| | STTASSVFPLAPSCGTTSGATVALACLVLGYFPEPVTVS | IgG1hinge |
| | WNSGALTSGVHTFPSVLQASGLYSLSSMVTVPSSRWLSD | |
| | TFTCNVAHRPSSTKVDKTVRKTDHPPGPKPCDCPKCPPP | |
| | EMLGGPSVFIFPPKPKDTLSISRTPEVTCLVVDLGPDDS | |
| | NVQITWFVDNTEMHTAKTRPREEQFNSTYRVVSVLPILH | |
| | QDWLKGKEFKCKVNSKSLPSAMERTISKAKGQPHEPQVY | |
| | VLPPTQEELSENKVSVTCLIKGFHPPDIAVEWEITGQPE | |
| | PENNYQTTPPQLDSDGTYFLYSRLSVDRSHWQRGNTYTC | |
| | SVSHEALHSHHTQKSLTQSPGK | |
| 81 | DITMTQSPGSLAGSPGQQVTMNCRASQEISGYLSWLQQK | Felinized Clone B |
| | PGGTIKRLIYAASTLDSGVPDRFSGSGSGTDFTLTISNL | variable LC and feline |
| | QAEDVASYYCVQYASYPWTFGGGTKLEIKRSDAQPSVFL | K light constant region |
| | FQPSLDELHTGSASIVCILNDFYPKEVNVKWKVDGVVQN | |
| | KGIQESTTEQNSKDSTYSLSSTLTMSSTEYQSHEKFSCE | |
| | VTHKSLASTLVKSFNRSECQRE | |
| 82 | QVLLVQSGAEVRKPGASVKIFCKASGYTFTSYVMHWLRQ | Felinized Clone I |
| | APAQGLEWMGYINPNNDGTFYNGKFQGRLTLTADTSTNT | variable HC v1 and |
| | AYMELSSLRSADTAVYYCAAFYYGFAYWGQGTLVTVSSA | variant feline IgG2 with |
| | STTASSVFPLAPSCGTTSGATVALACLVLGYFPEPVTVS | hinge Cys modification |
| | WNSGALTSGVHTFPSVLQASGLYSLSSMVTVPSSRWLSD | |
| | TFTCNVAHRPSSTKVDKTVPKTASTIESKTGECPKCPVP | |
| | EIPGAPSVFIFPPKPKDTLSISRTPEVTCLVVDLGPDDS | |
| | NVQITWFVDNTEMHTAKTRPREEQFNSTYRVVSVLPILH | |
| | QDWLKGKEFKCKVNSKSLPSAMERTISKAKGQPHEPQVY | |
| | VLPPTQEELSENKVSVTCLIKGFHPPDIAVEWEITGQPE | |
| | PENNYQTTPPQLDSDGTYFLYSRLSVDRSHWQRGNTYTC | |
| | SVSHEALHSHHTQKSLTQSPGK | |
| 372 | DVQLVESGGDLVKPGGSLRLTCKASGYTFTSYVMNWVRQ | Felinized Clone I |
| | APKQGLQWVAYINPNNDGTFYADSVKGRFTISRDNAKNT | variable HC v2 and |
| | LYLQMNSLKTEDTATYYCAAFYYGFAYWGQGTLVTVSSA | variant feline IgG2 with |
| | STTASSVFPLAPSCGTTSGATVALACLVLGYFPEPVTVS | hinge Cys modification |
| | WNSGALTSGVHTFPSVLQASGLYSLSSMVTVPSSRWLSD | |
| | TFTCNVAHRPSSTKVDKTVPKTASTIESKTGECPKCPVP | |
| | EIPGAPSVFIFPPKPKDTLSISRTPEVTCLVVDLGPDDS | |
| | NVQITWFVDNTEMHTAKTRPREEQFNSTYRVVSVLPILH | |
| | QDWLKGKEFKCKVNSKSLPSAMERTISKAKGQPHEPQVY | |
| | VLPPTQEELSENKVSVTCLIKGFHPPDIAVEWEITGQPE | |
| | PENNYQTTPPQLDSDGTYFLYSRLSVDRSHWQRGNTYTC | |
| | SVSHEALHSHHTQKSLTQSPGK | |
| 373 | DVQLVESGGDLVKPGGSLRLTCKASGYTFTSYVMHWVKQ | Felinized Clone I |
| | KPGQGLEWIGYINPNNDGTFYNGKFKGRFTISRDNAKNT | variable HC v3 and |
| | LYLQMNSLKTEDTATYYCAAFYYGFAYWGQGTLVTVSSA | variant feline IgG2 with |
| | STTASSVFPLAPSCGTTSGATVALACLVLGYFPEPVTVS | hinge Cys modification |
| | WNSGALTSGVHTFPSVLQASGLYSLSSMVTVPSSRWLSD | |
| | TFTCNVAHRPSSTKVDKTVPKTASTIESKTGECPKCPVP | |
| | EIPGAPSVFIFPPKPKDILSISRTPEVTCLVVDLGPDDS | |
| | NVQITWFVDNTEMHTAKTRPREEQFNSTYRVVSVLPILH | |
| | QDWLKGKEFKCKVNSKSLPSAMERTISKAKGQPHEPQVY | |
| | VLPPTQEELSENKVSVTCLIKGFHPPDIAVEWEITGQPE | |
| | PENNYQTTPPQLDSDGTYFLYSRLSVDRSHWQRGNTYTC | |
| | SVSHEALHSHHTQKSLTQSPGK | |
| 83 | QVLLVQSGAEVRKPGASVKIFCKASGYTFTSYVMHWLRQ | Felinized Clone I |
| | APAQGLEWMGYINPNNDGTFYNGKFQGRLTLTADTSTNT | variable HC v1 and |
| | AYMELSSLRSADTAVYYCAAFYYGFAYWGQGTLVTVSSA | variant feline IgG2 with |
| | STTASSVFPLAPSCGTTSGATVALACLVLGYFPEPVTVS | feline IgG1 hinge |
| | WNSGALTSGVHTFPSVLQASGLYSLSSMVTVPSSRWLSD | |
| | TFTCNVAHRPSSTKVDKTVRKTDHPPGPKPCDCPKCPPP | |
| | EMLGGPSVFIFPPKPKDTLSISRTPEVTCLVVDLGPDDS | |
| | NVQITWFVDNTEMHTAKTRPREEQFNSTYRVVSVLPILH | |
| | QDWLKGKEFKCKVNSKSLPSAMERTISKAKGQPHEPQVY | |
| | VLPPTQEELSENKVSVTCLIKGFHPPDIAVEWEITGQPE | |
| | PENNYQTTPPQLDSDGTYFLYSRLSVDRSHWQRGNTYTC | |
| | SVSHEALHSHHTQKSLTQSPGK | |
| 374 | DVQLVESGGDLVKPGGSLRLTCKASGYTFTSYVMNWVRQ | Felinized Clone I |
| | APKQGLQWVAYINPNNDGTFYADSVKGRFTISRDNAKNT | variable HC v2 and |
| | LYLQMNSLKTEDTATYYCAAFYYGFAYWGQGTLVTVSSA | variant feline IgG2 with |
| | STTASSVFPLAPSCGTTSGATVALACLVLGYFPEPVTVS | feline IgG1 hinge |
| | WNSGALTSGVHTFPSVLQASGLYSLSSMVTVPSSRWLSD | |
| | TFTCNVAHRPSSTKVDKTVRKTDHPPGPKPCDCPKCPPP | |
| | EMLGGPSVFIFPPKPKDTLSISRTPEVTCLVVDLGPDDS | |
| | NVQITWFVDNTEMHTAKTRPREEQFNSTYRVVSVLPILH | |
| | QDWLKGKEFKCKVNSKSLPSAMERTISKAKGQPHEPQVY | |
| | VLPPTQEELSENKVSVTCLIKGFHPPDIAVEWEITGQPE | |
| | PENNYQTTPPQLDSDGTYFLYSRLSVDRSHWQRGNTYTC | |
| | SVSHEALHSHHTQKSLTQSPGK | |
| 375 | DVQLVESGGDLVKPGGSLRLTCKASGYTFTSYVMHWVKQ | Felinized Clone I |
| | KPGQGLEWIGYINPNNDGTFYNGKFKGRFTISRDNAKNT | variable HC v3 and |
| | LYLQMNSLKTEDTATYYCAAFYYGFAYWGQGTLVTVSSA | variant feline IgG2 with |
| | STTASSVFPLAPSCGTTSGATVALACLVLGYFPEPVTVS | feline IgG1 hinge |
| | WNSGALTSGVHTFPSVLQASGLYSLSSMVTVPSSRWLSD | |
| | TFTCNVAHRPSSTKVDKTVRKTDHPPGPKPCDCPKCPPP | |
| | EMLGGPSVFIFPPKPKDTLSISRTPEVTCLVVDLGPDDS | |
| | NVQITWFVDNTEMHTAKTRPREEQFNSTYRVVSVLPILH | |
| | QDWLKGKEFKCKVNSKSLPSAMERTISKAKGQPHEPQVY | |
| | VLPPTQEELSENKVSVTCLIKGFHPPDIAVEWEITGQPE | |
| | PENNYQTTPPQLDSDGTYFLYSRLSVDRSHWQRGNTYTC | |
| | SVSHEALHSHHTQKSLTQSPGK | |
| 84 | DITMTQSPGSLAGSPGQQVTMNCRASQEISGYLSWLQQK | Felinized Clone I |
| | PGGTIKRLIYAASTLDSGVPDRFSGSGSGTDFTLTISNL | variable LC v1 and |
| | QAEDVASYYCLQYASYPWTFGGGTKLEIKRSDAQPSVFL | feline κ light constant |
| | FQPSLDELHTGSASIVCILNDFYPKEVNVKWKVDGVVQN | region |
| | KGIQESTTEQNSKDSTYSLSSTLTMSSTEYQSHEKFSCE | |
| | VTHKSLASTLVKSFNRSECQRE | |
| 376 | EIQMTQSPSSLSASPGDRVTITCRASQEISGYLAWYQQK | Felinized Clone I |
| | PGKVPKLLIYAASTLQTGVPSRFSGSGSGTDFTLTISSL | variable LC v2 and |
| | EPEDAATYYCLQYASYPWTFGQGTKLEIKRSDAQPSVFL | feline κ light constant |
| | FQPSLDELHTGSASIVCILNDFYPKEVNVKWKVDGVVQN | region |
| | KGIQESTTEQNSKDSTYSLSSTLTMSSTEYQSHEKFSCE | |
| | VTHKSLASTLVKSFNRSECQRE | |
| 377 | EIQMTQSPSSLSASPGDRVTITCRASQEISGYLSWLQQK | Felinized Clone I |
| | PDGTIKRLIYAASTLDTGVPSRFSGSGSGTDFTLTISSL | variable LC v3 and |
| | EPEDAATYYCLQYASYPWTFGQGTKLEIKRSDAQPSVFL | feline κ light constant |
| | FQPSLDELHTGSASIVCILNDFYPKEVNVKWKVDGVVQN | region |
| | KGIQESTTEQNSKDSTYSLSSTLTMSSTEYQSHEKFSCE | |
| | VTHKSLASTLVKSFNRSECQRE | |
| 378 | EITMTQSPGSLAGSPGQQVTMNCRASQEISGYLSWLQQK | Felinized Clone I |
| | PDGTIKRLIYAASTLDSGVPDRFSGSGSGTDFTLTISNL | variable LC v4 and |
| | QAEDVASYYCLQYASYPWTFGQGTKLEIKRSDAQPSVFL | feline κ light constant |
| | FQPSLDELHTGSASIVCILNDFYPKEVNVKWKVDGVVQN | region |
| | KGIQESTTEQNSKDSTYSLSSTLTMSSTEYQSHEKFSCE | |
| | VTHKSLASTLVKSFNRSECQRE | |
| 85 | LX₁₀FMGSENX11T | IL4R epitope 1 |
| | wherein X₁₀ is D or N and X₁₁ is H or R | (minimal sequence) |
| 86 | RLSYQLX₁₀FMGSENX₁₁TCVPEN | IL4R epitope 1 |
| | wherein X₁₀ is D or N and X₁₁ is H or R | (expanded sequence) |
| 87 | SMX₁₂X₁₃DDX₁₄VEADVYQLX₁₅LWAGX₁₆Q | IL4R epitope 2 |
| | wherein X₁₂ is P or L, X₁₃ is I or M, X₁₄ | |
| | is A or F, X₁₅ is D or H, and X₁₆ is Q or | |
| | T | |
| 88 | LDFMGSENHT | Canine IL4R epitope 1 |
| | | (minimal sequence) |
| 89 | RLSYQLDFMGSENHTCVPEN | Canine IL4R epitope 1 |
| | | (expanded sequence) |
| 90 | SMPIDDAVEADVYQLDLWAGQQ | Canine IL4R epitope 2 |
| 91 | LNFMGSENRT | Feline IL4R epitope 1 |
| | | (minimal sequence) |
| 92 | RLSYQLNFMGSENRTCVPEN | Feline IL4R epitope 1 |
| | | (expanded sequence) |
| 93 | SMLMDDFVEADVYQLHLWAGTQ | Feline IL4R epitope 2 |
| 94 | MGRLCSGLTFPVSCLVLVWVASSGSVKVLHEPSCFSDYI | Canine IL4R |
| | STSVCQWKMDHPTNCSAELRLSYQLDFMGSENHTCVPEN | NCBI Reference |
| | REDSVCVCSMPIDDAVEADVYQLDLWAGQQLLWSGSFQP | Sequence: |
| | SKHVKPRTPGNLTVHPNISHTWLLMWTNPYPTENHLHSE | XP_0139700003.1 |
| | LTYMVNVSNDNDPEDFKVYNVTYMGPTLRLAASTLKSGA | Interleukin-4 receptor |
| | SYSARVRAWAQTYNSTWSDWSPSTTWLNYYEPWEQHLPL | subunit alpha isoform |
| | GVSISCLVILAICLSCYFSIIKIKKGWWDQIPNPAHSPL | X1 [Canis lupus |
| | VAIVIQDSQVSLWGKRSRGQEPAKCPHWKTCLTKLLPCL | familiaris] |
| | LEHGLGREEESPKTAKNGPLQGPGKPAWCPVEVSKTILW | |
| | PESISVVQCVELSEAPVDNEEEEEVEEDKRSLCPSLEGS | |
| | GGSFQEGREGIVARLTESLFLDLLGGENGGFCPQGLEES | |
| | CLPPPSGSVGAQMPWAQFPRAGPRAAPEGPEQPRRPESA | |
| | LQASPTQSAGSSAFPEPPPVVTDNPAYRSFGSFLGQSSD | |
| | PGDGDSDPELADRPGEADPGIPSAPQPPEPPAALQPEPE | |
| | SWEQILRQSVLQHRAAPAPGPGPGSGYREFTCAVKQGSA | |
| | PDAGGPGFGPSGEAGYKAFCSLLPGGATCPGTSGGEAGS | |
| | GEGGYKPFQSLTPGCPGAPTPVPVPLFTFGLDTEPPGSP | |
| | QDSLGAGSSPEHLGVEPAGKEEDSRKTLLAPEQATDPLR | |
| | DDLASSIVYSALTCHLCGHLKQWHDQEERGKAHIVPSPC | |
| | CGCCCGDRSSLLLSPLRAPNVLPGGVLLEASLSPASLVP | |
| | SGVSKEGKSSPFSQPASSSAQSSSQTPKKLAVLSTEPTC | |
| | MSAS | |
| 95 | MGRLCSGLTFPVSCLILMWAAGSGSVKVLRAPTCFSDYF | Feline IL4R |
| | STSVCQWNMDAPTNCSAELRLSYQLNFMGSENRTCVPEN | NCBI Reference |
| | GEGAACACSMLMDDFVEADVYQLHLWAGTQLLWSGSFKP | Sequence: |
| | SSHVKPRAPGNLTVHPNVSHTWLLRWSNPYPPENHLHAE | XP_023102076.1 |
| | LTYMVNISSEDDPTDSRIYNVTYMGPTLRVAASTLTSGA | Interleukin-4 receptor |
| | SYSARVRAWAQSYNSTWSEWSPSTKWLNHYEPWEQHLPL | subunit alpha [Felis |
| | GVSISCLVILAVCLSCYLSVIKIKKEWWDQIPNPAHSHL | catus] |
| | VAIVIQDPQVSLWGKRSRGQEPAKCSHWKTCLRKLLPCL | |
| | LEHGMERKEDPSKIARNGPSQGSGKSAWCPVEVSKTILW | |
| | PESISVVRCVELLEAPVESEEEEEEEEEDKGSFCPSPVN | |
| | LEDSFQEGREGIAARLTESLFMDLLGVEKGGFGPQGSLE | |
| | SWFPPPSGSAGAQMPWAEFPGPGPQEASPQGKEQPFDPR | |
| | SDPLATLPQSPASPTFPETPPVVTDNPAYRSFGTFQGRS | |
| | SGPGECDSGPELAGRLGEADPGIPAAPQPSEPPSALQPE | |
| | AETWEQILRQRVLQHRGAPAPAPGSGYREFVCAVRQGST | |
| | QDSRVGDFGPSEEAGYKAFSSLLTSGAVCPETSGGEAGS | |
| | GDGGYKPFQSLTPGCPGAPAPVPVPLFTFGLDAEPPHCP | |
| | QDSPLPGSSPEPAGKAQDSHKTPPAPEQAADPLRDDLAS | |
| | GIVYSALTCHLCGHLKQCHGQEEGGEAHPVASPCCGCCC | |
| | GDRSSPLVSPLRAPDPLPGGVPLEASLSPASPAPLAVSE | |
| | EGPPSLCFQPALSHAHSSSQTPKKVAMLSPEPTCTMAS | |
| 96 | MGCLCPGLTLPVSCLILVWAAGSGSVKVLRLTACFSDYI | Equine IL4R |
| | SASTCEWKMDRPTNCSAQLRLSYQLNDEFSDNLTCIPEN | NCBI Reference |
| | REDEVCVCRMLMDNIVSEDVYELDLWAGNQLLWNSSFKP | Sequence: |
| | SRHVKPRAPQNLTVHAISHTWLLTWSNPYPLKNHLWSEL | NP_001075243.1 |
| | TYLVNISKEDDPTDFKIYNVTYMDPTLRVTASTLKSRAT | Interleukin-4 receptor |
| | YSARVKARAQNYNSTWSEWSPSTTWHNYYEQPLEQRLPL | subunit alpha precursor |
| | GVSISCVVILAICLSCYFSIIKIKKEWWDQIPNPAHSPL | [Equus caballus] |
| | VAIVLQDSQVSLWGKQSRGQEPAKCPRWKTCLTKLLPCL | |
| | LEHGLQKEEDSSKTVRNGPFQSPGKSAWHTVEVNHTILR | |
| | PEIISVVPCVELCEAQVESEEEEVEEDRGSFCPSPESSG | |
| | SGFQEGREGVAARLTESLFLGLLGAENGALGESCLLPPL | |
| | GSAHMPWARISSAGPQEAASQGEEQPLNPESNPLATLTQ | |
| | SPGSLAFTEAPAVVADNPAYRSFSNSLSQPRGPGELDSD | |
| | PQLAEHLGQVDPSIPSAPQPSEPPTALQPEPETWEQMLR | |
| | QSVLQQGAAPAPASAPTGGYREFAQVVKQGGGAAGSGPS | |
| | GEAGYKAFSSLLAGSAVCPGQSGVEASSGEGGYRPYESP | |
| | DPGAPAPVPVPLFTFGLDVEPPHSPQNSLLPGGSPELPG | |
| | PEPTVKGEDPRKPLLSAQQATDSLRDDLGSGIVYSALTC | |
| | HLCGHLKQCHGQEEHGEAHTVASPCCGCCCGDRSSPPVS | |
| | PVRALDPPPGGVPLEAGLSLASLGSLGLSEERKPSLFFQ | |
| | PAPGNAQSSSQTPLTVAMLSTGPTCTSAS | |
| 97 | MGRLCTKFLTSVGCLILLLVTGSGSIKVLGEPTCFSDYI | Murine IL4R |
| | RTSTCEWFLDSAVDCSSQLCLHYRLMFFEFSENLTCIPR | NCBI Reference |
| | NSASTVCVCHMEMNRPVQSDRYQMELWAEHRQLWQGSFS | Sequence: |
| | PSGNVKPLAPDNLTLHTNVSDEWLLTWNNLYPSNNLLYK | NP_001008700.1 |
| | DLISMVNISREDNPAEFIVYNVTYKEPRLSFPINILMSG | Interleukin-4 receptor |
| | VYYTARVRVRSQILTGTWSEWSPSITWYNHFQLPLIQRL | subunit alpha isoform 1 |
| | PLGVTISCLCIPLFCLFCYFSITKIKKIWWDQIPTPARS | precursor [Mus |
| | PLVAIIIQDAQVPLWDKQTRSQESTKYPHWKTCLDKLLP | musculus] |
| | CLLKHRVKKKTDFPKAAPTKSLQSPGKAGWCPMEVSRTV | |
| | LWPENVSVSVVRCMELFEAPVQNVEEEEDEIVKEDLSMS | |
| | PENSGGCGFQESQADIMARLTENLFSDLLEAENGGLGQS | |
| | ALAESCSPLPSGSGQASVSWACLPMGPSEEATCQVTEQP | |
| | SHPGPLSGSPAQSAPTLACTQVPLVLADNPAYRSFSDCC | |
| | SPAPNPGELAPEQQQADHLEEEEPPSPADPHSSGPPMQP | |
| | VESWEQILHMSVLQHGAAAGSTPAPAGGYQEFVQAVKQG | |
| | AAQDPGVPGVRPSGDPGYKAFSSLLSSNGIRGDTAAAGT | |
| | DDGHGGYKPFQNPVPNQSPSSVPLFTFGLDTELSPSPLN | |
| | SDPPKSPPECLGLELGLKGGDWVKAPPPADQVPKPFGDD | |
| | LGFGIVYSSLTCHLCGHLKQHHSQEEGGQSPIVASPGCG | |
| | CCYDDRSPSLGSLSGALESCPEGIPPEANLMSAPKTPSN | |
| | LSGEGKGPGHSPVPSQTTEVPVGALGIAVS | |
| 98 | MGWLCSGLLFPVSCLVLLQVASSGNMKVLQEPTCVSDYM | Human IL4R |
| | SISTCEWKMNGPTNCSTELRLLYQLVFLLSEAHTCIPEN | NCBI Reference |
| | NGGAGCVCHLLMDDVVSADNYTLDLWAGQQLLWKGSFKP | Sequence: |
| | SEHVKPRAPGNLTVHINVSDILLLTWSNPYPPDNYLYNH | NP_000409.1 |
| | LTYAVNIWSENDPADFRIYNVTYLEPSLRIAASTLKSGI | Interleukin-4 receptor |
| | SYRARVRAWAQCYNTTWSEWSPSTKWHNSYREPFEQHLL | subunit alpha isoform a |
| | LGVSVSCIVILAVCLLCYVSITKIKKEWWDQIPNPARSR | precursor [Homo |
| | LVAIIIQDAQGSQWEKRSRGQEPAKCPHWKNCLTKLLPC | sapiens] |
| | FLEHNMKRDEDPHKAAKEMPFQGSGKSAWCPVEISKTVL | |
| | WPESISVVRCVELFEAPVECEEEEEVEEEKGSFCASPES | |
| | SRDDFQEGREGIVARLTESLFLDLLGEENGGFCQQDMGE | |
| | SCLLPPSGSTSAHMPWDEFPSAGPKEAPPWGKEQPLHLE | |
| | PSPPASPTQSPDNLTCTETPLVIAGNPAYRSFSNSLSQS | |
| | PCPRELGPDPLLARHLEEVEPEMPCVPQLSEPTTVPQPE | |
| | PETWEQILRRNVLQHGAAAAPVSAPTSGYQEFVHAVEQG | |
| | GTQASAVVGLGPPGEAGYKAFSSLLASSAVSPEKCGFGA | |
| | SSGEEGYKPFQDLIPGCPGDPAPVPVPLFTFGLDREPPR | |
| | SPQSSHLPSSSPEHLGLEPGEKVEDMPKPPLPQEQATDP | |
| | LVDSLGSGIVYSALTCHLCGHLKQCHGQEDGGQTPVMAS | |
| | PCCGCCCGDRSSPPTTPLRAPDPSPGGVPLEASLCPASL | |
| | APSGISEKSKSSSSFHPAPGNAQSSSQTPKIVNFVSVGP | |
| | TYMRVS | |
| 99 | GSVKVLHEPSCFSDYISTSVCQWKMDHPTNCSAELRLSY | Canine IL4R_ECD |
| | QLDFMGSENHTCVPENREDSVCVCSMPIDDAVEADVYQL | |
| | DLWAGQQLLWSGSFQPSKHVKPRTPGNLTVHPNISHTWL | |
| | LMWTNPYPTENHLHSELTYMVNVSNDNDPEDFKVYNVTY | |
| | MGPTLRLAASTLKSGASYSARVRAWAQTYNSTWSDWSPS | |
| | TTWLNYYE | |
| 100 | GSVKVLRAPTCFSDYFSTSVCQWNMDAPTNCSAELRLSY | Feline IL4R_ECD |
| | QLNFMGSENRTCVPENGEGAACACSMLMDDFVEADVYQL | |
| | HLWAGTQLLWSGSFKPSSHVKPRAPGNLTVHPNVSHTWL | |
| | LRWSNPYPPENHLHAELTYMVNISSEDDPTDSRIYNVTY | |
| | MGPTLRVAASTLTSGASYSARVRAWAQSYNSTWSEWSPS | |
| | TKWLNHYE | |
| 101 | VKVLRLTACFSDYISASTCEWKMDRPTNCSAQLRLSYQL | Equine IL4R_ECD |
| | NDEFSDNLTCIPENREDEVCVCRMLMDNIVSEDVYELDL | |
| | WAGNQLLWNSSFKPSRHVKPRAPQNLTVHAISHTWLLTW | |
| | SNPYPLKNHLWSELTYLVNISKEDDPTDFKIYNVTYMDP | |
| | TLRVTASTLKSRATYSARVKARAQNYNSTWSEWSPSTTW | |
| | HNYYEQPLEQR | |
| 102 | IKVLGEPTCFSDYIRTSTCEWFLDSAVDCSSQLCLHYRL | Murine IL4R_ECD |
| | MFFEFSENLTCIPRNSASTVCVCHMEMNRPVQSDRYQME | |
| | LWAEHRQLWQGSFSPSGNVKPLAPDNLTLHTNVSDEWLL | |
| | TWNNLYPSNNLLYKDLISMVNISREDNPAEFIVYNVTYK | |
| | EPRLSFPINILMSGVYYTARVRVRSQILTGTWSEWSPSI | |
| | TWYNHFQLPLIQRLPLGVTISCLCIPLFCLFCYFSITKI | |
| | KKIW | |
| 103 | GNMKVLQEPTCVSDYMSISTCEWKMNGPTNCSTELRLLY | Human IL4R_ECD |
| | QLVFLLSEAHTCIPENNGGAGCVCHLLMDDVVSADNYTL | |
| | DLWAGQQLLWKGSFKPSEHVKPRAPGNLTVHTNVSDILL | |
| | LTWSNPYPPDNYLYNHLTYAVNIWSENDPADFRIYNVTY | |
| | LEPSLRIAASTLKSGISYRARVRAWAQCYNTTWSEWSPS | |
| | TKWHNSYREPFEQH | |
| 104 | MGRLCSGLTFPVSCLVLVWVASSGSVKVLHEPSCFSDYI | Canine IL4R_C-FLAG |
| | STSVCQWKMDHPTNCSAELRLSYQLDFMGSENHTCVPEN | with leader |
| | REDSVCVCSMPIDDAVEADVYQLDLWAGQQLLWSGSFQP | |
| | SKHVKPRTPGNLTVHPNISHTWLLMWTNPYPTENHLHSE | |
| | LTYMVNVSNDNDPEDFKVYNVTYMGPTLRLAASTLKSGA | |
| | SYSARVRAWAQTYNSTWSDWSPSTTWLNYYEPWEQHLPL | |
| | GVSISCLVILAICLSCYFSIIKIKKGWWDQIPNPAHSPL | |
| | VAIVIQDSQVSLWGKRSRGQEPAKCPHWKTCLTKLLPCL | |
| | LEHGLGREEESPKTAKNGPLQGPGKPAWCPVEVSKTILW | |
| | PESISVVQCVELSEAPVDNEEEEEVEEDKRSLCPSLEGS | |
| | GGSFQEGREGIVARLTESLFLDLLGGENGGFCPQGLEES | |
| | CLPPPSGSVGAQMPWAQFPRAGPRAAPEGPEQPRRPESA | |
| | LQASPTQSAGSSAFPEPPPVVTDNPAYRSFGSFLGQSSD | |
| | PGDGDSDPELADRPGEADPGIPSAPQPPEPPAALQPEPE | |
| | SWEQILRQSVLQHRAAPAPGPGPGSGYREFTCAVKQGSA | |
| | PDAGGPGFGPSGEAGYKAFCSLLPGGATCPGTSGGEAGS | |
| | GEGGYKPFQSLTPGCPGAPTPVPVPLFTFGLDTEPPGSP | |
| | QDSLGAGSSPEHLGVEPAGKEEDSRKTLLAPEQATDPLR | |
| | DDLASSIVYSALTCHLCGHLKQWHDQEERGKAHIVPSPC | |
| | CGCCCGDRSSLLLSPLRAPNVLPGGVLLEASLSPASLVP | |
| | SGVSKEGKSSPFSQPASSSAQSSSQTPKKLAVLSTEPTC | |
| | MSASGSGSDYKDDDDK | |
| 105 | GSVKVLHEPSCFSDYISTSVCQWKMDHPINCSAELRLSY | Canine IL4R_C-FLAG |
| | QLDFMGSENHTCVPENREDSVCVCSMPIDDAVEADVYQL | |
| | DLWAGQQLLWSGSFQPSKHVKPRTPGNLTVHPNISHTWL | |
| | LMWTNPYPTENHLHSELTYMVNVSNDNDPEDFKVYNVTY | |
| | MGPTLRLAASTLKSGASYSARVRAWAQTYNSTWSDWSPS | |
| | TTWLNYYEPWEQHLPLGVSISCLVILAICLSCYFSIIKI | |
| | KKGWWDQIPNPAHSPLVAIVIQDSQVSLWGKRSRGQEPA | |
| | KCPHWKTCLTKLLPCLLEHGLGREEESPKTAKNGPLQGP | |
| | GKPAWCPVEVSKTILWPESISVVQCVELSEAPVDNEEEE | |
| | EVEEDKRSLCPSLEGSGGSFQEGREGIVARLTESLFLDL | |
| | LGGENGGFCPQGLEESCLPPPSGSVGAQMPWAQFPRAGP | |
| | RAAPEGPEQPRRPESALQASPTQSAGSSAFPEPPPVVTD | |
| | NPAYRSFGSFLGQSSDPGDGDSDPELADRPGEADPGIPS | |
| | APQPPEPPAALQPEPESWEQILRQSVLQHRAAPAPGPGP | |
| | GSGYREFTCAVKQGSAPDAGGPGFGPSGEAGYKAFCSLL | |
| | PGGATCPGTSGGEAGSGEGGYKPFQSLTPGCPGAPTPVP | |
| | VPLFTFGLDTEPPGSPQDSLGAGSSPEHLGVEPAGKEED | |
| | SRKTLLAPEQATDPLRDDLASSIVYSALTCHLCGHLKQW | |
| | HDQEERGKAHIVPSPCCGCCCGDRSSLLLSPLRAPNVLP | |
| | GGVLLEASLSPASLVPSGVSKEGKSSPFSQPASSSAQSS | |
| | SQTPKKLAVLSTEPTCMSASGSGSDYKDDDDK | |
| 106 | MDMRVPAQLLGLLLLWLRGARCSGSVKVLHEPSCFSDYI | Canine IL4R-ECD_C- |
| | STSVCQWKMDHPTNCSAELRLSYQLDFMGSENHTCVPEN | His6 with leader |
| | REDSVCVCSMPIDDAVEADVYQLDLWAGQQLLWSGSFQP | |
| | SKHVKPRTPGNLTVHPNISHTWLLMWTNPYPTENHLHSE | |
| | LTYMVNVSNDNDPEDFKVYNVTYMGPTLRLAASTLKSGA | |
| | SYSARVRAWAQTYNSTWSDWSPSTTWLNYYEPGSGSHHH | |
| | HHH | |
| 107 | GSVKVLHEPSCFSDYISTSVCQWKMDHPINCSAELRLSY | Canine IL4R-ECD_C- |
| | QLDFMGSENHTCVPENREDSVCVCSMPIDDAVEADVYQL | His6 |
| | DLWAGQQLLWSGSFQPSKHVKPRTPGNLTVHPNISHTWL | |
| | LMWTNPYPTENHLHSELTYMVNVSNDNDPEDFKVYNVTY | |
| | MGPTLRLAASTLKSGASYSARVRAWAQTYNSTWSDWSPS | |
| | TTWLNYYEPGSGSHHHHHH | |
| 108 | MDMRVPAQLLGLLLLWLRGARCSGSVKVLHEPSCFSDYI | Canine IL4R-ECD_ |
| | STSVCQWKMDHPTNCSAELRLSYQLDFMGSENHTCVPEN | C-HuFc_His6 with |
| | REDSVCVCSMPIDDAVEADVYQLDLWAGQQLLWSGSFQP | leader |
| | SKHVKPRTPGNLTVHPNISHTWLLMWTNPYPTENHLHSE | |
| | LTYMVNVSNDNDPEDFKVYNVTYMGPTLRLAASTLKSGA | |
| | SYSARVRAWAQTYNSTWSDWSPSTTWLNYYEPGSENLYF | |
| | QGPKSCDKTHTCPPCPAPELLGGPSVFLFPPKPKDTLMI | |
| | SRTPEVTCVVVDVSHEDPEVKFNWYVDGVEVHNAKTKPR | |
| | EEQYNSTYRVVSVLTVLHQDWLNGKEYKCKVSNKALPAP | |
| | IEKTISKAKGQPREPQVYTLPPSRDELTKNQVSLTCLVK | |
| | GFYPSDIAVEWESNGQPENNYKTTPPVLDSDGSFFLYSK | |
| | LTVDKSRWQQGNVFSCSVMHEALHNHYTQKSLSLSPGKH | |
| | HHHHH | |
| 109 | GSVKVLHEPSCFSDYISTSVCQWKMDHPINCSAELRLSY | Canine IL4R-ECD |
| | QLDFMGSENHTCVPENREDSVCVCSMPIDDAVEADVYQL | C-HuFc_His6 |
| | DLWAGQQLLWSGSFQPSKHVKPRTPGNLTVHPNISHTWL | |
| | LMWTNPYPTENHLHSELTYMVNVSNDNDPEDFKVYNVTY | |
| | MGPTLRLAASTLKSGASYSARVRAWAQTYNSTWSDWSPS | |
| | TTWLNYYEPGSENLYFQGPKSCDKTHTCPPCPAPELLGG | |
| | PSVFLFPPKPKDTLMISRTPEVTCVVVDVSHEDPEVKEN | |
| | WYVDGVEVHNAKTKPREEQYNSTYRVVSVLTVLHQDWLN | |
| | GKEYKCKVSNKALPAPIEKTISKAKGQPREPQVYTLPPS | |
| | RDELTKNQVSLTCLVKGFYPSDIAVEWESNGQPENNYKT | |
| | TPPVLDSDGSFFLYSKLTVDKSRWQQGNVFSCSVMHEAL | |
| | HNHYTQKSLSLSPGKHHHHHH | |
| 110 | MDMRVPAQLLGLLLLWLRGARCGSVKVLRAPTCFSDYFS | Feline IL4R-ECD_ |
| | TSVCQWNMDAPTNCSAELRLSYQLNFMGSENRTCVPENG | C-HuFc_His6 with |
| | EGAACACSMLMDDFVEADVYQLHLWAGTQLLWSGSFKPS | leader |
| | SHVKPRAPGNLTVHPNVSHTWLLRWSNPYPPENHLHAEL | |
| | TYMVNISSEDDPTDSRIYNVTYMGPTLRVAASTLTSGAS | |
| | YSARVRAWAQSYNSTWSDWSPSTTWLNYYEGSENLYFQG | |
| | PKSCDKTHTCPPCPAPELLGGPSVFLFPPKPKDTLMISR | |
| | TPEVTCVVVDVSHEDPEVKFNWYVDGVEVHNAKTKPREE | |
| | QYNSTYRVVSVLIVLHQDWLNGKEYKCKVSNKALPAPIE | |
| | KTISKAKGQPREPQVYTLPPSRDELTKNQVSLTCLVKGF | |
| | YPSDIAVEWESNGQPENNYKTTPPVLDSDGSFFLYSKLT | |
| | VDKSRWQQGNVFSCSVMHEALHNHYTQKSLSLSPGKHHH | |
| | HHH | |
| 111 | GSVKVLRAPTCFSDYFSTSVCQWNMDAPTNCSAELRLSY | Feline IL4R-ECD |
| | QLNFMGSENRTCVPENGEGAACACSMLMDDFVEADVYQL | C-HuFc_His6 |
| | HLWAGTQLLWSGSFKPSSHVKPRAPGNLTVHPNVSHTWL | |
| | LRWSNPYPPENHLHAELTYMVNISSEDDPTDSRIYNVTY | |
| | MGPTLRVAASTLTSGASYSARVRAWAQSYNSTWSDWSPS | |
| | TTWLNYYEGSENLYFQGPKSCDKTHTCPPCPAPELLGGP | |
| | SVFLFPPKPKDTLMISRTPEVTCVVVDVSHEDPEVKENW | |
| | YVDGVEVHNAKTKPREEQYNSTYRVVSVLTVLHQDWLNG | |
| | KEYKCKVSNKALPAPIEKTISKAKGQPREPQVYTLPPSR | |
| | DELTKNQVSLTCLVKGFYPSDIAVEWESNGQPENNYKTT | |
| | PPVLDSDGSFFLYSKLTVDKSRWQQGNVFSCSVMHEALH | |
| | NHYTQKSLSLSPGKHHHHHH | |
| 112 | MPSSVSWGILLLAGLCCLVPVSLAVKVLRLTACFSDYIS | Equine IL4R-ECD |
| | ASTCEWKMDRPTNCSAQLRLSYQLNDEFSDNLTCIPENR | C-HuFc_His6 with |
| | EDEVCVCRMLMDNIVSEDVYELDLWAGNQLLWNSSFKPS | leader |
| | RHVKPRAPQNLTVHAISHTWLLTWSNPYPLKNHLWSELT | |
| | YLVNISKEDDPTDFKIYNVTYMDPTLRVTASTLKSRATY | |
| | SARVKARAQNYNSTWSEWSPSTTWHNYYEQPLEQRGGGS | |
| | GGGSENLYFQGPKSCDKTHTCPPCPAPELLGGPSVFLFP | |
| | PKPKDTLMISRTPEVTCVVVDVSHEDPEVKFNWYVDGVE | |
| | VHNAKTKPREEQYNSTYRVVSVLIVLHQDWLNGKEYKCK | |
| | VSNKALPAPIEKTISKAKGQPREPQVYTLPPSRDELTKN | |
| | QVSLTCLVKGFYPSDIAVEWESNGQPENNYKTTPPVLDS | |
| | DGSFFLYSKLTVDKSRWQQGNVFSCSVMHEALHNHYTQK | |
| | SLSLSPGKHHHHHH | |
| 113 | VKVLRLTACFSDYISASTCEWKMDRPTNCSAQLRLSYQL | Equine IL4R-ECD |
| | NDEFSDNLTCIPENREDEVCVCRMLMDNIVSEDVYELDL | C-HuFc_His6 |
| | WAGNQLLWNSSFKPSRHVKPRAPQNLTVHAISHTWLLTW | |
| | SNPYPLKNHLWSELTYLVNISKEDDPTDFKIYNVTYMDP | |
| | TLRVTASTLKSRATYSARVKARAQNYNSTWSEWSPSTTW | |
| | HNYYEQPLEQRGGGSGGGSENLYFQGPKSCDKTHTCPPC | |
| | PAPELLGGPSVFLFPPKPKDTLMISRTPEVTCVVVDVSH | |
| | EDPEVKFNWYVDGVEVHNAKTKPREEQYNSTYRVVSVLT | |
| | VLHQDWLNGKEYKCKVSNKALPAPIEKTISKAKGQPREP | |
| | QVYTLPPSRDELTKNQVSLTCLVKGFYPSDIAVEWESNG | |
| | QPENNYKTTPPVLDSDGSFFLYSKLTVDKSRWQQGNVFS | |
| | CSVMHEALHNHYTQKSLSLSPGKHHHHHH | |
| 114 | MGWLCSGLLFPVSCLVLLQVASSIKVLGEPTCFSDYIRT | Murine IL4R-ECD_ |
| | STCEWFLDSAVDCSSQLCLHYRLMFFEFSENLTCIPRNS | C-HuFc_His6 with |
| | ASTVCVCHMEMNRPVQSDRYQMELWAEHRQLWQGSFSPS | leader |
| | GNVKPLAPDNLTLHTNVSDEWLLTWNNLYPSNNLLYKDL | |
| | ISMVNISREDNPAEFIVYNVTYKEPRLSFPINILMSGVY | |
| | YTARVRVRSQILTGTWSEWSPSITWYNHFQLPLIQRLPL | |
| | GVTISCLCIPLFCLFCYFSITKIKKIWGSENLYFQGPKS | |
| | CDKTHTCPPCPAPELLGGPSVFLFPPKPKDTLMISRTPE | |
| | VTCVVVDVSHEDPEVKFNWYVDGVEVHNAKTKPREEQYN | |
| | STYRVVSVLTVLHQDWLNGKEYKCKVSNKALPAPIEKTI | |
| | SKAKGQPREPQVYTLPPSRDELTKNQVSLTCLVKGFYPS | |
| | DIAVEWESNGQPENNYKTTPPVLDSDGSFFLYSKLTVDK | |
| | SRWQQGNVFSCSVMHEALHNHYTQKSLSLSPGKHHHHHH | |
| 115 | IKVLGEPTCFSDYIRTSTCEWFLDSAVDCSSQLCLHYRL | Murine IL4R-ECD |
| | MFFEFSENLTCIPRNSASTVCVCHMEMNRPVQSDRYQME | C-HuFc_His6 |
| | LWAEHRQLWQGSFSPSGNVKPLAPDNLTLHTNVSDEWLL | |
| | TWNNLYPSNNLLYKDLISMVNISREDNPAEFIVYNVTYK | |
| | EPRLSFPINILMSGVYYTARVRVRSQILIGTWSEWSPSI | |
| | TWYNHFQLPLIQRLPLGVTISCLCIPLFCLFCYFSITKI | |
| | KKIWGSENLYFQGPKSCDKTHTCPPCPAPELLGGPSVFL | |
| | FPPKPKDTLMISRTPEVTCVVVDVSHEDPEVKENWYVDG | |
| | VEVHNAKTKPREEQYNSTYRVVSVLTVLHQDWLNGKEYK | |
| | CKVSNKALPAPIEKTISKAKGQPREPQVYTLPPSRDELT | |
| | KNQVSLTCLVKGFYPSDIAVEWESNGQPENNYKTTPPVL | |
| | DSDGSFFLYSKLTVDKSRWQQGNVFSCSVMHEALHNHYT | |
| | QKSLSLSPGKHHHHHH | |
| 116 | MGWLCSGLLFPVSCLVLLQVASSGNMKVLQEPTCVSDYM | Human IL4R-ECD |
| | SISTCEWKMNGPTNCSTELRLLYQLVFLLSEAHTCIPEN | C-HuFc_His6 |
| | NGGAGCVCHLLMDDVVSADNYTLDLWAGQQLLWKGSFKP | with leader |
| | SEHVKPRAPGNLTVHTNVSDTLLLTWSNPYPPDNYLYNH | |
| | LTYAVNIWSENDPADFRIYNVTYLEPSLRIAASTLKSGI | |
| | SYRARVRAWAQCYNTTWSEWSPSTKWHNSYREPFEQHGS | |
| | ENLYFQGPKSCDKTHTCPPCPAPELLGGPSVFLFPPKPK | |
| | DTLMISRTPEVTCVVVDVSHEDPEVKFNWYVDGVEVHNA | |
| | KTKPREEQYNSTYRVVSVLTVLHQDWLNGKEYKCKVSNK | |
| | ALPAPIEKTISKAKGQPREPQVYTLPPSRDELTKNQVSL | |
| | TCLVKGFYPSDIAVEWESNGQPENNYKTTPPVLDSDGSF | |
| | FLYSKLTVDKSRWQQGNVFSCSVMHEALHNHYTQKSLSL | |
| | SPGKHHHHHH | |
| 117 | GNMKVLQEPTCVSDYMSISTCEWKMNGPTNCSTELRLLY | Human IL4R-ECD_ |
| | QLVFLLSEAHTCIPENNGGAGCVCHLLMDDVVSADNYTL | C-HuFc_His6 |
| | DLWAGQQLLWKGSFKPSEHVKPRAPGNLTVHTNVSDTLL | |
| | LTWSNPYPPDNYLYNHLTYAVNIWSENDPADFRIYNVTY | |
| | LEPSLRIAASTLKSGISYRARVRAWAQCYNTTWSEWSPS | |
| | TKWHNSYREPFEQHGSENLYFQGPKSCDKTHTCPPCPAP | |
| | ELLGGPSVFLFPPKPKDTLMISRTPEVTCVVVDVSHEDP | |
| | EVKFNWYVDGVEVHNAKTKPREEQYNSTYRVVSVLTVLH | |
| | QDWLNGKEYKCKVSNKALPAPIEKTISKAKGQPREPQVY | |
| | TLPPSRDELTKNQVSLTCLVKGFYPSDIAVEWESNGQPE | |
| | NNYKTTPPVLDSDGSFFLYSKLTVDKSRWQQGNVFSCSV | |
| | MHEALHNHYTQKSLSLSPGKHHHHHH | |
| 118 | MGLTSQLIPTLVCLLALTSTFVHGHNFNITIKEIIKMLN | Canine IL4 precursor |
| | ILTARNDSCMELTVKDVFTAPKNTSDKEIFCRAATVLRQ | NCBI Ref: |
| | IYTHNCSNRYLRGLYRNLSSMANKTCSMNEIKKSTLKDF | NP_001003159.1 |
| | LERLKVIMQKKYYRH | |
| 119 | MGLTYQLIPALVCLLAFTSTFVHGQNENNTLKEIIKTLN | Feline IL4 precursor |
| | ILTARNDSCMELTVMDVLAAPKNTSDKEIFCRATTVLRQ | UniProtKB/Swiss-Prot |
| | IYTHHNCSTKFLKGLDRNLSSMANRTCSVNEVKKCTLKD | Ref: P55030.1 |
| | FLERLKAIMQKKYSKH | |
| 120 | MGLTYQLIPALVCLLACTSNFIQGCKYDITLQEIIKTLN | Equine IL4 precursor |
| | NLTDGKGKNSCMELTVADAFAGPKNTDGKEICRAAKVLQ | NCBI Ref: |
| | QLYKRHDRSLIKECLSGLDRNLKGMANGTCCTVNEAKKS | NP_001075988.1 |
| | TLKDFLERLKTIMKEKYSKC | |
| 121 | MGLTSQLIPTLVCLLALISTFVHGHNFNITIKEIIKMLN | Canine IL4 precursor |
| | ILTARNDSCMELTVKDVFTAPKNTSDKEIFCRAATVLRQ | NCBI Ref: |
| | IYTHNCSNRYLRGLYRNLSSMANKTCSMNEIKKSTLKDF | NP_001003159.1 |
| | LERLKVIMQKKYYRH | |
| 122 | MDLTSQLIPALVCLLAFTSTFVHGQNFNNTLKEIIKTLN | Feline IL4 precursor |
| | ILTARNDSCMELTVMDVLAAPKNTSDKEIFCRATTVLRQ | NCBI Ref: |
| | IYTHHNCSTKFLKGLDRNLSSMANRTCSVNEVKKCTLKD | NP_001036804.1 |
| | FLERLKAIMQKKYSKH | |
| 123 | MGLISQLIPALVCLLACTSNFIQGCKYDITLQEIIKTLN | Predicted Equine IL4 |
| | NLTDGKGKNSCMELTVADAFAGPKNTDGKEICRAAKVLQ | precursor |
| | QLYKRHDRSLIKECLSGLDRNLKGMANGTCCTVNEAKKS | NCBI Ref: |
| | TLKDFLERLKTIMKEKYSKCQS | XP_008536927.1 |
| 124 | MGLTSQLIPTLVCLLALTSTFVHGSSHHHHHHSSGLVPR | Canine IL4_N-His6 with |
| | GSHMHNFNITIKEIIKMLNILTARNDSCMELTVKDVFTA | leader |
| | PKNTSDKEIFCRAATVLRQIYTHNCSNRYLRGLYRNLSS | |
| | MANKTCSMNEIKKSTLKDFLERLKVIMQKKYYRH | |
| 125 | SHHHHHHSSGLVPRGSHMHNFNITIKEIIKMLNILTARN | Canine IL4_N-His6 |
| | DSCMELTVKDVFTAPKNTSDKEIFCRAATVLRQIYTHNC | |
| | SNRYLRGLYRNLSSMANKTCSMNEIKKSTLKDFLERLKV | |
| | IMQKKYYRH | |
| 126 | MGLTSQLIPTLVCLLALTSTFVHGHNFNITIKEIIKMLN | Canine IL4_C-His6 with |
| | ILTARNDSCMELTVKDVFTAPKNTSDKEIFCRAATVLRQ | leader |
| | IYTHNCSNRYLRGLYRNLSSMANKTCSMNEIKKSTLKDF | |
| | LERLKVIMQKKYYRHHHHHH | |
| 127 | HNFNITIKEIIKMLNILTARNDSCMELTVKDVFTAPKNT | Canine IL4_C-His6 |
| | SDKEIFCRAATVLRQIYTHNCSNRYLRGLYRNLSSMANK | |
| | TCSMNEIKKSTLKDFLERLKVIMQKKYYRGSGSHHHHHH | |
| 128 | MDLTSQLIPALVCLLAFTSTFVHGQNFNNTLKEIIKTLN | Feline IL4_C-His6 with |
| | ILTARNDSCMELTVMDVLAAPKNTSDKEIFCRATTVLRQ | leader |
| | IYTHHNCSTKFLKGLDRNLSSMANRTCSVNEVKKCTLKD | |
| | FLERLKAIMQKKYSKHGSGSHHHHHH | |
| 129 | QNFNNTLKEIIKTLNILTARNDSCMELTVMDVLAAPKNT | Feline IL4_C-His6 |
| | SDKEIFCRATTVLRQIYTHHNCSTKFLKGLDRNLSSMAN | |
| | RTCSVNEVKKCTLKDFLERLKAIMQKKYSKHGSGSHHHH | |
| | HH | |
| 130 | MGLISQLIPALVCLLACTSNFIQGCKYDITLQEIIKTLN | Equine IL4_C-His6 with |
| | NLTDGKGKNSCMELTVADAFAGPKNTDGKEICRAAKVLQ | leader |
| | QLYKRHDRSLIKECLSGLDRNLKGMANGTCCTVNEAKKS | |
| | TLKDFLERLKTIMKEKYSKCQGSGSHHHHHH | |
| 131 | CKYDITLQEIIKTLNNLTDGKGKNSCMELTVADAFAGPK | Equine IL4_C-His6 |
| | NTDGKEICRAAKVLQQLYKRHDRSLIKECLSGLDRNLKG | |
| | MANGTCCTVNEAKKSTLKDFLERLKTIMKEKYSKCQGSG | |
| | SHHHHHH | |
| 132 | MDMRVPAQLLGLLLLWLRGARC | exemplary leader |
| | | sequence |
| 133 | GSVKVLHEPSCFSDYISTSVCQWKMDHPTNCSAELRLSY | Canine/Human IL4R- |
| | QLDFMGSENHTCVPENNGGAGCVCHLLMDDVVSADNYTL | ECD_C-HuFc_His6 |
| | DLWAGQQLLWKGSFKPSEHVKPRAPGNLTVHTNVSDTLL | Hybrid1 |
| | LTWSNPYPPDNYLYNHLTYAVNIWSENDPADFRIYNVTY | (Hybrid 1) |
| | LEPSLRIAASTLKSGISYRARVRAWAQCYNTTWSEWSPS | Canine IL4R ECD G1- |
| | TKWHNSYREPFEQHGSENLYFQGPKSCDKTHTCPPCPAP | N55 (bold) |
| | ELLGGPSVFLFPPKPKDTLMISRTPEVTCVVVDVSHEDP | Human IL4R ECD N56- |
| | EVKFNWYVDGVEVHNAKTKPREEQYNSTYRVVSVLTVLH | H209 (italic) |
| | QDWLNGKEYKCKVSNKALPAPIEKTISKAKGQPREPQVY | Human Fc_His6 |
| | TLPPSRDELTKNQVSLTCLVKGFYPSDIAVEWESNGQPE | (underline) |
| | NNYKTTPPVLDSDGSFFLYSKLTVDKSRWQQGNVFSCSV | |
| | MHEALHNHYTQKSLSLSPGKHHHHHH | |
| 134 | GNMKVLQEPTCVSDYMSISTCEWKMNGPTNCSTELRLLY | Canine/Human IL4R- |
| | QLVFLLSEAHTCIPENREDSVCVCSMPIDDAVEADVYQL | ECD_C-HuFc_His6 |
| | DLWAGQQLLWSGSFQPSKHVKPRTPGNLTVHTNVSDTLL | Hybrid2 |
| | LTWSNPYPPDNYLYNHLTYAVNIWSENDPADFRIYNVTY | (Hybrid 2) |
| | LEPSLRIAASTLKSGISYRARVRAWAQCYNTTWSEWSPS | Human IL4R ECD G1- |
| | TKWHNSYREPFEQHGSENLYFQGPKSCDKTHTCPPCPAP | N55 and T110-H209 |
| | ELLGGPSVFLFPPKPKDTLMISRTPEVTCVVVDVSHEDP | (italic) |
| | EVKFNWYVDGVEVHNAKTKPREEQYNSTYRVVSVLTVLH | Canine IL4R ECD R56- |
| | QDWLNGKEYKCKVSNKALPAPIEKTISKAKGQPREPQVY | H109 (bold) |
| | TLPPSRDELTKNQVSLTCLVKGFYPSDIAVEWESNGQPE | Human Fc_His6 |
| | NNYKTTPPVLDSDGSFFLYSKLTVDKSRWQQGNVFSCSV | (underline) |
| | MHEALHNHYTQKSLSLSPGKHHHHHH | |
| 135 | GNMKVLQEPTCVSDYMSISTCEWKMNGPTNCSTELRLLY | Canine/Human IL4R- |
| | QLVFLLSEAHTCIPENNGGAGCVCHLLMDDVVSADNYTL | ECD_C-HuFc_His6 |
| | DLWAGQQLLWKGSFKPSEHVKPRAPGNLTVHPNISHTWL | Hybrid3 |
| | LMWTNPYPTENHLHSELTYMVNVSNDNDPEDFKVYNVTY | (Hybrid 3) |
| | MGPTLRLAASTLKSGASYSARVRAWAQTYNSTWSDWSPS | Human IL4R ECD G1- |
| | TTWLNYYEPGSENLYFQGPKSCDKTHTCPPCPAPELLGG | H109 (italic) |
| | PSVFLFPPKPKDTLMISRTPEVTCVVVDVSHEDPEVKEN | Canine IL4R ECD |
| | WYVDGVEVHNAKTKPREEQYNSTYRVVSVLTVLHQDWLN | P110-P204 (bold) |
| | GKEYKCKVSNKALPAPIEKTISKAKGQPREPQVYTLPPS | Human Fc_His6 |
| | RDELTKNQVSLTCLVKGFYPSDIAVEWESNGQPENNYKT | (underline) |
| | TPPVLDSDGSFFLYSKLTVDKSRWQQGNVFSCSVMHEAL | |
| | HNHYTQKSLSLSPGKHHHHHH | |
| 136 | GSVKVLHEPSCFSDYISTSVCQWKMDHPTNCSAELRLSY | Canine/Human IL4R- |
| | QLDFMGSENHTCVPENREDSVCVCSMPIDDAVEADVYQL | ECD_C-HuFc_His6_ |
| | DLWAGQQLLWSGSFQPSKHVKPRTPGNLTVHTNVSDTLL | Hybrid4 |
| | LTWSNPYPPDNYLYNHLTYAVNIWSENDPADFRIYNVTY | (Hybrid 4) |
| | LEPSLRIAASTLKSGISYRARVRAWAQCYNTTWSEWSPS | Canine IL4R ECD G1- |
| | TKWHNSYREPFEQHGSENLYFQGPKSCDKTHTCPPCPAP | H109 (bold) |
| | ELLGGPSVFLFPPKPKDTLMISRTPEVTCVVVDVSHEDP | Human ILAR ECD |
| | EVKFNWYVDGVEVHNAKTKPREEQYNSTYRVVSVLTVLH | T110-H209 (italic) |
| | QDWLNGKEYKCKVSNKALPAPIEKTISKAKGQPREPQVY | Human Fc_His6 |
| | TLPPSRDELTKNQVSLTCLVKGFYPSDIAVEWESNGQPE | (underline) |
| | NNYKTTPPVLDSDGSFFLYSKLTVDKSRWQQGNVFSCSV | |
| | MHEALHNHYTQKSLSLSPGKHHHHHH | |
| 137 | GNMKVLQEPTCVSDYMSISTCEWKMNGPTNCSTELRLLY | Canine/Human IL4R- |
| | QLVFLLSEAHTCIPENREDSVCVCSMPIDDAVEADVYQL | ECD_C-HuFc_His6 |
| | DLWAGQQLLWSGSFQPSKHVKPRTPGNLTVHPNISHTWL | Hybrid5 |
| | LMWTNPYPTENHLHSELTYMVNVSNDNDPEDFKVYNVTY | (Hybrid 5) |
| | MGPTLRLAASTLKSGASYSARVRAWAQTYNSTWSDWSPS | Human IL4R ECD G1- |
| | TTWLNYYEPGSENLYFQGPKSCDKTHTCPPCPAPELLGG | N55 (italic) |
| | PSVFLFPPKPKDTLMISRTPEVTCVVVDVSHEDPEVKEN | Canine IL4R ECD R56- |
| | WYVDGVEVHNAKTKPREEQYNSTYRVVSVLTVLHQDWLN | P204 |
| | GKEYKCKVSNKALPAPIEKTISKAKGQPREPQVYTLPPS | (bold) |
| | RDELTKNQVSLTCLVKGFYPSDIAVEWESNGQPENNYKT | Human Fc_His6 |
| | TPPVLDSDGSFFLYSKLTVDKSRWQQGNVFSCSVMHEAL | (underline) |
| | HNHYTQKSLSLSPGKHHHHHH | |
| 138 | GSVKVLHEPSCFSDYISTSVCQWKMDHPTNCSAELRLSY | Canine/Human IL4R- |
| | QLDFMGSENHTCVPENNGGAGCVCHLLMDDVVSADNYTL | ECD_C-HuFc_His6_ |
| | DLWAGQQLLWKGSFKPSEHVKPRAPGNLTVHPNISHTWL | Hybrid6 |
| | LMWTNPYPTENHLHSELTYMVNVSNDNDPEDFKVYNVTY | (Hybrid 6) |
| | MGPTLRLAASTLKSGASYSARVRAWAQTYNSTWSDWSPS | Canine IL4R ECD G1- |
| | TTWLNYYEPGSENLYFQGPKSCDKTHTCPPCPAPELLGG | N55, P110-P204 (bold) |
| | PSVFLFPPKPKDTLMISRTPEVTCVVVDVSHEDPEVKEN | Human IL4R ECD N56- |
| | WYVDGVEVHNAKTKPREEQYNSTYRVVSVLTVLHQDWLN | H109 (italic) |
| | GKEYKCKVSNKALPAPIEKTISKAKGQPREPQVYTLPPS | Human Fc_His6 |
| | RDELTKNQVSLTCLVKGFYPSDIAVEWESNGQPENNYKT | (underline) |
| | TPPVLDSDGSFFLYSKLTVDKSRWQQGNVFSCSVMHEAL | |
| | HNHYTQKSLSLSPGKHHHHHH | |
| 139 | GNMKVLQEPTCVSDYMSISTCEWKMNGPTNCSAELRLSY | Canine/Human IL4R- |
| | QLDFMGSENHTCVPENREDSVCVCSMPIDDAVEADVYQL | ECD_C-HuFc_His6 |
| | DLWAGQQLLWSGSFQPSKHVKPRTPGNLTVHPNISHTWL | Hybrid7 |
| | LMWTNPYPTENHLHSELTYMVNVSNDNDPEDEKVYNVTY | (Hybrid 7) |
| | MGPTLRLAASTLKSGASYSARVRAWAQTYNSTWSDWSPS | Human IL4R ECD G1- |
| | TTWLNYYEPGSENLYFQGPKSCDKTHTCPPCPAPELLGG | N30 (italic) |
| | PSVFLFPPKPKDTLMISRTPEVTCVVVDVSHEDPEVKEN | Canine IL4R ECD C31- |
| | WYVDGVEVHNAKTKPREEQYNSTYRVVSVLTVLHQDWLN | P204 (bold) |
| | GKEYKCKVSNKALPAPIEKTISKAKGQPREPQVYTLPPS | Human Fc_His6 |
| | RDELTKNQVSLTCLVKGFYPSDIAVEWESNGQPENNYKT | (underline) |
| | TPPVLDSDGSFFLYSKLTVDKSRWQQGNVFSCSVMHEAL | |
| | HNHYTQKSLSLSPGKHHHHHH | |
| 140 | GSVKVLHEPSCFSDYISTSVCQWKMDHPTNCSTELRLLY | Canine/Human IL4R- |
| | QLVFLLSEAHTCIPENREDSVCVCSMPIDDAVEADVYQL | ECD_C-HuFc_His6 |
| | DLWAGQQLLWSGSFQPSKHVKPRTPGNLTVHPNISHTWL | Fusion8 |
| | LMWTNPYPTENHLHSELTYMVNVSNDNDPEDEKVYNVTY | (Fusion 8) |
| | MGPTLRLAASTLKSGASYSARVRAWAQTYNSTWSDWSPS | Canine IL4R ECD G1- |
| | TTWLNYYEPGSENLYFQGPKSCDKTHTCPPCPAPELLGG | N30 and R56-P204 |
| | PSVFLFPPKPKDTLMISRTPEVTCVVVDVSHEDPEVKEN | (bold) |
| | WYVDGVEVHNAKTKPREEQYNSTYRVVSVLTVLHQDWLN | Human IL4R ECD C31- |
| | GKEYKCKVSNKALPAPIEKTISKAKGQPREPQVYTLPPS | N55 (italic) |
| | RDELTKNQVSLTCLVKGFYPSDIAVEWESNGQPENNYKT | Human Fc_His6 |
| | TPPVLDSDGSFFLYSKLTVDKSRWQQGNVFSCSVMHEAL | (underline) |
| | HNHYTQKSLSLSPGKHHHHHH | |
| 141 | GSVKVLHEPSCFSDYISTSVCQWKMDHPTNCSTELRLLY | Canine/Human IL4R- |
| | QLDFMGSENHTCVPENREDSVCVCSMPIDDAVEADVYQL | ECD_C-HuFc_His6_ |
| | DLWAGQQLLWSGSFQPSKHVKPRTPGNLTVHPNISHTWL | Hybrid9 |
| | LMWTNPYPTENHLHSELTYMVNVSNDNDPEDFKVYNVTY | (Hybrid 9) |
| | MGPTLRLAASTLKSGASYSARVRAWAQTYNSTWSDWSPS | Canine IL4R ECD G1- |
| | TTWLNYYEPGSENLYFQGPKSCDKTHTCPPCPAPELLGG | N30 and D42-P204 |
| | PSVFLFPPKPKDTLMISRTPEVTCVVVDVSHEDPEVKEN | (bold) |
| | WYVDGVEVHNAKTKPREEQYNSTYRVVSVLIVLHQDWLN | Human IL4R ECD C31- |
| | GKEYKCKVSNKALPAPIEKTISKAKGQPREPQVYTLPPS | L41 (italic) |
| | RDELTKNQVSLTCLVKGFYPSDIAVEWESNGQPENNYKT | Human Fc_His6 |
| | TPPVLDSDGSFFLYSKLTVDKSRWQQGNVFSCSVMHEAL | (underline) |
| | HNHYTQKSLSLSPGKHHHHHH | |
| 142 | GSVKVLHEPSCFSDYISTSVCQWKMDHPTNCSAELRLSY | Canine/Human IL4R- |
| | QLVFLLSEAHTCIPENREDSVCVCSMPIDDAVEADVYQL | ECD_C-HuFc_His6_ |
| | DLWAGQQLLWSGSFQPSKHVKPRTPGNLTVHPNISHTWL | Hybrid10 |
| | LMWTNPYPTENHLHSELTYMVNVSNDNDPEDFKVYNVTY | (Hybrid 10) |
| | MGPTLRLAASTLKSGASYSARVRAWAQTYNSTWSDWSPS | Canine IL4R ECD G1- |
| | TTWLNYYEPGSENLYFQGPKSCDKTHTCPPCPAPELLGG | L41 and R56-P204 |
| | PSVFLFPPKPKDTLMISRTPEVTCVVVDVSHEDPEVKEN | (bold) |
| | WYVDGVEVHNAKTKPREEQYNSTYRVVSVLTVLHQDWLN | Human IL4R ECD V42- |
| | GKEYKCKVSNKALPAPIEKTISKAKGQPREPQVYTLPPS | N55 (italic) |
| | RDELTKNQVSLTCLVKGFYPSDIAVEWESNGQPENNYKT | Human Fc_His6 |
| | TPPVLDSDGSFFLYSKLTVDKSRWQQGNVFSCSVMHEAL | (underline) |
| | HNHYTQKSLSLSPGKHHHHHH | |
| 143 | GSVKVLHEPSCFSDYISTSVCQWKMDHPTNCSAELRLSY | Canine/Human IL4R- |
| | QLDFMGSENHTCVPENNGGAGCVCHLLMDDVVEADVYQL | ECD_C-HuFc_His6_ |
| | DLWAGQQLLWSGSFQPSKHVKPRTPGNLTVHPNISHTWL | Hybrid11 |
| | LMWTNPYPTENHLHSELTYMVNVSNDNDPEDFKVYNVTY | (Hybrid 11) |
| | MGPTLRLAASTLKSGASYSARVRAWAQTYNSTWSDWSPS | Canine IL4R ECD G1- |
| | TTWLNYYEPGSENLYFQGPKSCDKTHTCPPCPAPELLGG | N55 and E72-P204 |
| | PSVFLFPPKPKDTLMISRTPEVTCVVVDVSHEDPEVKEN | (bold) |
| | WYVDGVEVHNAKTKPREEQYNSTYRVVSVLTVLHQDWLN | Human IL4R ECD N56- |
| | GKEYKCKVSNKALPAPIEKTISKAKGQPREPQVYTLPPS | V71 (italic) |
| | RDELTKNQVSLTCLVKGFYPSDIAVEWESNGQPENNYKT | Human Fc_His6 |
| | TPPVLDSDGSFFLYSKLTVDKSRWQQGNVFSCSVMHEAL | (underline) |
| | HNHYTQKSLSLSPGKHHHHHH | |
| 144 | GSVKVLHEPSCFSDYISTSVCQWKMDHPTNCSAELRLSY | Canine/Human IL4R- |
| | QLDFMGSENHTCVPENREDSVCVCSMPIDDAVSADNYTL | ECD_C-HuFc_His6 |
| | DLWAGQQLLWKGSFQPSKHVKPRTPGNLTVHPNISHTWL | Hybrid12 |
| | LMWTNPYPTENHLHSELTYMVNVSNDNDPEDFKVYNVTY | (Hybrid 12) |
| | MGPTLRLAASTLKSGASYSARVRAWAQTYNSTWSDWSPS | Canine IL4R ECD G1- |
| | TTWLNYYEPGSENLYFQGPKSCDKTHTCPPCPAPELLGG | V71 and G90-P204 |
| | PSVFLFPPKPKDTLMISRTPEVTCVVVDVSHEDPEVKEN | (bold) |
| | WYVDGVEVHNAKTKPREEQYNSTYRVVSVLTVLHQDWLN | Human IL4R ECD S72- |
| | GKEYKCKVSNKALPAPIEKTISKAKGQPREPQVYTLPPS | K89 (italic) |
| | RDELTKNQVSLTCLVKGFYPSDIAVEWESNGQPENNYKT | Human Fc_His6 |
| | TPPVLDSDGSFFLYSKLTVDKSRWQQGNVFSCSVMHEAL | (underline) |
| | HNHYTQKSLSLSPGKHHHHHH | |
| 145 | GSVKVLHEPSCFSDYISTSVCQWKMDHPTNCSAELRLSY | Canine/Human IL4R- |
| | QLDFMGSENHTCVPENREDSVCVCSMPIDDAVEADVYQL | ECD_C-HuFc_His6 |
| | DLWAGQQLLWSGSFKPSEHVKPRAPGNLTVHPNISHTWL | Hybrid13 |
| | LMWTNPYPTENHLHSELTYMVNVSNDNDPEDFKVYNVTY | (Hybrid 13) |
| | MGPTLRLAASTLKSGASYSARVRAWAQTYNSTWSDWSPS | Canine IL4R ECD G1- |
| | TTWLNYYEPGSENLYFQGPKSCDKTHTCPPCPAPELLGG | S89 and P110-P204 |
| | PSVFLFPPKPKDTLMISRTPEVTCVVVDVSHEDPEVKEN | (bold) |
| | WYVDGVEVHNAKTKPREEQYNSTYRVVSVLTVLHQDWLN | Human IL4R ECD G90- |
| | GKEYKCKVSNKALPAPIEKTISKAKGQPREPQVYTLPPS | H109 (italic) |
| | RDELTKNQVSLTCLVKGFYPSDIAVEWESNGQPENNYKT | Human Fc_His6 |
| | TPPVLDSDGSFFLYSKLTVDKSRWQQGNVFSCSVMHEAL | (underline) |
| | HNHYTQKSLSLSPGKHHHHHH | |
| 146 | GSVKVLHEPSCFSDYISTSVCQWKMDHPTNCSAELRLSY | Canine/Human IL4R- |
| | QLDFMGSENHTCVPENREDSVCVCSMPIDDVVSADNYTL | ECD_C-HuFc_His6 |
| | DLWAGQQLLWKGSFKPSKHVKPRTPGNLTVHPNISHTWL | Hybrid14 |
| | LMWTNPYPTENHLHSELTYMVNVSNDNDPEDFKVYNVTY | (Hybrid 14) |
| | MGPTLRLAASTLKSGASYSARVRAWAQTYNSTWSDWSPS | Canine IL4R ECD G1- |
| | TTWLNYYEPGSENLYFQGPKSCDKTHTCPPCPAPELLGG | I67 and S95-P204 (bold) |
| | PSVFLFPPKPKDTLMISRTPEVTCVVVDVSHEDPEVKEN | Human IL4R ECD D68- |
| | WYVDGVEVHNAKTKPREEQYNSTYRVVSVLTVLHQDWLN | P94 (italic) |
| | GKEYKCKVSNKALPAPIEKTISKAKGQPREPQVYTLPPS | Human Fc_His6 |
| | RDELTKNQVSLTCLVKGFYPSDIAVEWESNGQPENNYKT | (underline) |
| | TPPVLDSDGSFFLYSKLTVDKSRWQQGNVFSCSVMHEAL | |
| | HNHYTQKSLSLSPGKHHHHHH | |
| 147 | GSVKVLHEPSCFSDYISTSVCQWKMDHPINCSTELRLSY | Canine IL4R-ECD |
| | QLDFMGSENHTCVPENREDSVCVCSMPIDDAVEADVYQL | C-HuFc_His6.A33T |
| | DLWAGQQLLWSGSFQPSKHVKPRTPGNLTVHPNISHTWL | (Mutant 1) |
| | LMWTNPYPTENHLHSELTYMVNVSNDNDPEDFKVYNVTY | |
| | MGPTLRLAASTLKSGASYSARVRAWAQTYNSTWSDWSPS | |
| | TTWLNYYEPGSENLYFQGPKSCDKTHTCPPCPAPELLGG | |
| | PSVFLFPPKPKDTLMISRTPEVTCVVVDVSHEDPEVKEN | |
| | WYVDGVEVHNAKTKPREEQYNSTYRVVSVLTVLHQDWLN | |
| | GKEYKCKVSNKALPAPIEKTISKAKGQPREPQVYTLPPS | |
| | RDELTKNQVSLTCLVKGFYPSDIAVEWESNGQPENNYKT | |
| | TPPVLDSDGSFFLYSKLTVDKSRWQQGNVFSCSVMHEAL | |
| | HNHYTQKSLSLSPGKHHHHHH | |
| 148 | GSVKVLHEPSCFSDYISTSVCQWKMDHPINCSAELRLSY | Canine IL4R-ECD_ |
| | QLDFAGSENHTCVPENREDSVCVCSMPIDDAVEADVYQL | C-HuFc_His6.M44A |
| | DLWAGQQLLWSGSFQPSKHVKPRTPGNLTVHPNISHTWL | (Mutant 2) |
| | LMWTNPYPTENHLHSELTYMVNVSNDNDPEDFKVYNVTY | |
| | MGPTLRLAASTLKSGASYSARVRAWAQTYNSTWSDWSPS | |
| | TTWLNYYEPGSENLYFQGPKSCDKTHTCPPCPAPELLGG | |
| | PSVFLFPPKPKDTLMISRTPEVTCVVVDVSHEDPEVKEN | |
| | WYVDGVEVHNAKTKPREEQYNSTYRVVSVLTVLHQDWLN | |
| | GKEYKCKVSNKALPAPIEKTISKAKGQPREPQVYTLPPS | |
| | RDELTKNQVSLTCLVKGFYPSDIAVEWESNGQPENNYKT | |
| | TPPVLDSDGSFFLYSKLTVDKSRWQQGNVFSCSVMHEAL | |
| | HNHYTQKSLSLSPGKHHHHHH | |
| 149 | GSVKVLHEPSCFSDYISTSVCQWKMDHPINCSAELRLSY | Canine IL4R-ECD_ |
| | QLDFMASENHTCVPENREDSVCVCSMPIDDAVEADVYQL | C-HuFc_His6.G45A |
| | DLWAGQQLLWSGSFQPSKHVKPRTPGNLTVHPNISHTWL | (Mutant 3) |
| | LMWTNPYPTENHLHSELTYMVNVSNDNDPEDFKVYNVTY | |
| | MGPTLRLAASTLKSGASYSARVRAWAQTYNSTWSDWSPS | |
| | TTWLNYYEPGSENLYFQGPKSCDKTHTCPPCPAPELLGG | |
| | PSVFLFPPKPKDTLMISRTPEVTCVVVDVSHEDPEVKEN | |
| | WYVDGVEVHNAKTKPREEQYNSTYRVVSVLTVLHQDWLN | |
| | GKEYKCKVSNKALPAPIEKTISKAKGQPREPQVYTLPPS | |
| | RDELTKNQVSLTCLVKGFYPSDIAVEWESNGQPENNYKT | |
| | TPPVLDSDGSFFLYSKLTVDKSRWQQGNVFSCSVMHEAL | |
| | HNHYTQKSLSLSPGKHHHHHH | |
| 150 | GSVKVLHEPSCFSDYISTSVCQWKMDHPINCSAELRLSY | Canine IL4R-ECD_ |
| | QLDFMGSEAHTCVPENREDSVCVCSMPIDDAVEADVYQL | |
| | DLWAGQQLLWSGSFQPSKHVKPRTPGNLTVHPNISHTWL | |
| | LMWTNPYPTENHLHSELTYMVNVSNDNDPEDFKVYNVTY | |
| | MGPTLRLAASTLKSGASYSARVRAWAQTYNSTWSDWSPS | |
| | TTWLNYYEPGSENLYFQGPKSCDKTHTCPPCPAPELLGG | |
| | PSVFLFPPKPKDTLMISRTPEVTCVVVDVSHEDPEVKEN | C-HuFc_His6.N48A |
| | WYVDGVEVHNAKTKPREEQYNSTYRVVSVLTVLHQDWLN | (Mutant 4) |
| | GKEYKCKVSNKALPAPIEKTISKAKGQPREPQVYTLPPS | |
| | RDELTKNQVSLTCLVKGFYPSDIAVEWESNGQPENNYKT | |
| | TPPVLDSDGSFFLYSKLTVDKSRWQQGNVFSCSVMHEAL | |
| | HNHYTQKSLSLSPGKHHHHHH | |
| 151 | GSVKVLHEPSCFSDYISTSVCQWKMDHPINCSAELRLAY | Canine IL4R-ECD |
| | QLDFMGSENHTCVPENREDSVCVCSMPIDDAVEADVYQL | C-HuFc_His6.S38A |
| | DLWAGQQLLWSGSFQPSKHVKPRTPGNLTVHPNISHTWL | (Mutant 5) |
| | LMWTNPYPTENHLHSELTYMVNVSNDNDPEDFKVYNVTY | |
| | MGPTLRLAASTLKSGASYSARVRAWAQTYNSTWSDWSPS | |
| | TTWLNYYEPGSENLYFQGPKSCDKTHTCPPCPAPELLGG | |
| | PSVFLFPPKPKDTLMISRTPEVTCVVVDVSHEDPEVKEN | |
| | WYVDGVEVHNAKTKPREEQYNSTYRVVSVLTVLHQDWLN | |
| | GKEYKCKVSNKALPAPIEKTISKAKGQPREPQVYTLPPS | |
| | RDELTKNQVSLTCLVKGFYPSDIAVEWESNGQPENNYKT | |
| | TPPVLDSDGSFFLYSKLTVDKSRWQQGNVFSCSVMHEAL | |
| | HNHYTQKSLSLSPGKHHHHHH | |
| 152 | GSVKVLHEPSCFSDYISTSVCQWKMDHPINCSAELRLSY | Canine IL4R-ECD_ |
| | QLAFMGSENHTCVPENREDSVCVCSMPIDDAVEADVYQL | |
| | DLWAGQQLLWSGSFQPSKHVKPRTPGNLTVHPNISHTWL | |
| | LMWTNPYPTENHLHSELTYMVNVSNDNDPEDFKVYNVTY | |
| | MGPTLRLAASTLKSGASYSARVRAWAQTYNSTWSDWSPS | |
| | TTWLNYYEPGSENLYFQGPKSCDKTHTCPPCPAPELLGG | |
| | PSVFLFPPKPKDTLMISRTPEVTCVVVDVSHEDPEVKEN | |
| | WYVDGVEVHNAKTKPREEQYNSTYRVVSVLTVLHQDWLN | C-HuFc_His6.D42A |
| | GKEYKCKVSNKALPAPIEKTISKAKGQPREPQVYTLPPS | (Mutant 6) |
| | RDELTKNQVSLTCLVKGFYPSDIAVEWESNGQPENNYKT | |
| | TPPVLDSDGSFFLYSKLTVDKSRWQQGNVFSCSVMHEAL | |
| | HNHYTQKSLSLSPGKHHHHHH | |
| 153 | GSVKVLHEPSCFSDYISTSVCQWKMDHPINCSAELRLSY | Canine IL4R-ECD |
| | QLDFMGSENATCVPENREDSVCVCSMPIDDAVEADVYQL | |
| | DLWAGQQLLWSGSFQPSKHVKPRTPGNLTVHPNISHTWL | |
| | LMWTNPYPTENHLHSELTYMVNVSNDNDPEDFKVYNVTY | |
| | MGPTLRLAASTLKSGASYSARVRAWAQTYNSTWSDWSPS | |
| | TTWLNYYEPGSENLYFQGPKSCDKTHTCPPCPAPELLGG | |
| | PSVFLFPPKPKDTLMISRTPEVTCVVVDVSHEDPEVKEN | C-HuFc_His6.H49A |
| | WYVDGVEVHNAKTKPREEQYNSTYRVVSVLTVLHQDWLN | (Mutant 7) |
| | GKEYKCKVSNKALPAPIEKTISKAKGQPREPQVYTLPPS | |
| | RDELTKNQVSLTCLVKGFYPSDIAVEWESNGQPENNYKT | |
| | TPPVLDSDGSFFLYSKLTVDKSRWQQGNVFSCSVMHEAL | |
| | HNHYTQKSLSLSPGKHHHHHH | |
| 154 | MALWLTVVIALTCLGGLASPSPVTPSPTLKELIEELVNI | Canine IL13 precursor |
| | TQNQASLCNGSMVWSVNLTAGMYCAALESLINVSDCSAI | NCBI Ref: |
| | QRTQRMLKALCSQKPAAGQISSERSRDTKIEVIQLVKNL | NP_001003384 |
| | LTYVRGVYRHGNFR | |
| 155 | MWFLDSTRQSGDQGGRRHTWPIKATARGQGHKPLSLGQP | Feline IL13 precursor |
| | TCPLLAPPVLALGSMALWLTVVIALTCLGGLASPGPHSR | NCBI Ref: |
| | RELKELIEELVNITQNQVSLCNGSMVWSVNLTTGMQYCA | XP_006927648 |
| | ALESLINVSDCTAIQRTQRMLKALCTQKPSAGQTASERS | |
| | RDTKIEVIQLVKNLLNHLRRNFRHGNFK | |
| 156 | MALWLTVVIALTCLGGLASPSPVTPSPTLKELIEELVNI | Canine IL13_C-His6 |
| | TQNQASLCNGSMVWSVNLTAGMYCAALESLINVSDCSAI | with leader |
| | QRTQRMLKALCSQKPAAGQISSERSRDTKIEVIQLVKNL | |
| | LTYVRGVYRHGNFRGSHHHHHH | |
| 157 | SPSPVTPSPTLKELIEELVNITQNQASLCNGSMVWSVNL | Canine IL13_C-His6 |
| | TAGMYCAALESLINVSDCSAIQRTQRMLKALCSQKPAAG | |
| | QISSERSRDTKIEVIQLVKNLLTYVRGVYRHGNFRGSHH | |
| | HHHH | |
| 158 | MALWLTVVIALTCLGGLASPGPHSRRELKELIEELVNIT | Feline IL13_C-His6 |
| | QNQLLQVSLCNGSMVWSVNLTTGMQYCAALESLINVSDC | with leader |
| | TAIQRTQRMLKALCTQKPSAGQTASERSRDTKIEVIQLV | |
| | KNLLNHLRRNFRHGNFKGSGSHHHHHH | |
| 159 | SPGPHSRRELKELIEELVNITQNQLLQVSLCNGSMVWSV | Feline IL13_C-His6 |
| | NLTTGMQYCAALESLINVSDCTAIQRTQRMLKALCTQKP | |
| | SAGQTASERSRDTKIEVIQLVKNLLNHLRRNFRHGNFKG | |
| | SGSHHHHHH | |
| 160 | MERPARLCGLWALLLCAAGGRGGGVAAPTETQPPVTNLSVSVE | Canine IL13R |
| | NLCTVIWTWDPPEGASPNCTLRYFSHFDNKQDKKIAPETHRSK | NCBI Ref: |
| | EVPLNERICLQVGSQCSTNESDNPSILVEKCTPPPEGDPESAV | XP_538150.3 |
| | TELQCVWHNLSYMKCTWLPGRNTSPDTNYTLYYWHSSLGKILQ | |
| | CEDIYREGQHIGCSFALTNLKDSSFEQHSVQIVVKDNAGKIRP | |
| | SFNIVPLTSHVKPDPPHIKRLFFQNGNLYVQWKNPQNFYSRCL | |
| | SYQVEVNNSQTETNDIFYVEEAKCQNSEFEGNLEGTICFMVPG | |
| | VLPDTLNTVRIRVRTNKLCYEDDKLWSNWSQAMSIGENTDPTF | |
| | YITMLLATPVIVAGAIIVLLLYLKRLKIIIFPPIPDPGKIFKE | |
| | MFGDQNDDTLHWRKYDIYEKQTKEETDSVVLIENLKKASQ | |
| 161 | TETQPPVTNLSVSVENLCTVIWTWDPPEGASPNCTLRYFSHFD | Canine IL13R ECD |
| | NKQDKKIAPETHRSKEVPLNERICLQVGSQCSTNESDNPSILV | |
| | EKCTPPPEGDPESAVTELQCVWHNLSYMKCTWLPGRNTSPDTN | |
| | YTLYYWHSSLGKILQCEDIYREGQHIGCSFALTNLKDSSFEQH | |
| | SVQIVVKDNAGKIRPSFNIVPLTSHVKPDPPHIKRLFFQNGNL | |
| | YVQWKNPQNFYSRCLSYQVEVNNSQTETNDIFYVEEAKCQNSE | |
| | FEGNLEGTICFMVPGVLPDTLNTVRIRVRINKLCYEDDKLWSN | |
| | WSQAMSIGENTDPT | |
| 162 | PVPEPLGGPSVLIFPPKPKDILRITRTPEVTCVVLDLGR | Exemplary wild-type |
| | EDPEVQISWFVDGKEVHTAKTQSREQQFNGTYRVVSVLP | canine IgG-A Fc |
| | IEHQDWLTGKEFKCRVNHIDLPSPIERTISKARGRAHKP | Protein A− |
| | SVYVLPPSPKELSSSDTVSITCLIKDFYPPDIDVEWQSN | C1q− |
| | GQQEPERKHRMTPPQLDEDGSYFLYSKLSVDKSRWQQGD | CD16− |
| | PFTCAVMHETLQNHYTDLSLSHSPGK | |
| 163 | PAPEMLGGPSVFIFPPKPKDTLLIARTPEVTCVVVDLDP | Exemplary wild-type |
| | EDPEVQISWFVDGKQMQTAKTQPREEQFNGTYRVVSVLP | canine IgG-B Fc |
| | IGHQDWLKGKQFTCKVNNKALPSPIERTISKARGQAHQP | Protein A+ |
| | SVYVLPPSREELSKNTVSLTCLIKDFFPPDIDVEWQSNG | C1q+ |
| | QQEPESKYRTTPPQLDEDGSYFLYSKLSVDKSRWQRGDT | CD16+ |
| | FICAVMHEALHNHYTQESLSHSPGK | |
| 164 | PKRENGRVPRPPDCPKCPAPEMLGGPSVFIFPPKPKDTLL | Exemplary wild-type |
| | IARTPEVTCVVVDLDPEDPEVQISWFVDGKQMQTAKTQP | canine IgG-B Fc with |
| | REEQFNGTYRVVSVLPIGHQDWLKGKQFTCKVNNKALPS | hinge |
| | PIERTISKARGQAHQPSVYVLPPSREELSKNTVSLTCLI | Protein A+ |
| | KDFFPPDIDVEWQSNGQQEPESKYRTTPPQLDEDGSYFL | C1q+ |
| | YSKLSVDKSRWQRGDTFICAVMHEALHNHYTQESLSHSP | CD16+ |
| | GK | |
| 165 | PGCGLLGGPSVFIFPPKPKDILVTARTPTVTCVVVDLDP | Exemplary wild-type |
| | ENPEVQISWFVDSKQVQTANTQPREEQSNGTYRVVSVLP | canine IgG-C Fc |
| | IGHQDWLSGKQFKCKVNNKALPSPIEEIISKTPGQAHQP | Protein A− |
| | NVYVLPPSRDEMSKNTVTLTCLVKDFFPPEIDVEWQSNG | Clq+ |
| | QQEPESKYRMTPPQLDEDGSYFLYSKLSVDKSRWQRGDT | CD16+ |
| | FICAVMHEALHNHYTQISLSHSPGK | |
| 166 | AKECECKCNCNNCPCPGCGLLGGPSVFIFPPKPKDILVT | Exemplary wild-type |
| | ARTPTVTCVVVDLDPENPEVQISWFVDSKQVQTANTQPR | canine IgG-C Fc with |
| | EEQSNGTYRVVSVLPIGHQDWLSGKQFKCKVNNKALPSP | hinge |
| | IEEIISKTPGQAHQPNVYVLPPSRDEMSKNTVTLTCLVK | Protein A− |
| | DFFPPEIDVEWQSNGQQEPESKYRMTPPQLDEDGSYFLY | C1q+ |
| | SKLSVDKSRWQRGDTFICAVMHEALHNHYTQISLSHSPG | CD16+ |
| | K | |
| 167 | PVPESLGGPSVFIFPPKPKDILRITRTPEITCVVLDLGR | Exemplary wild-type |
| | EDPEVQISWFVDGKEVHTAKTQPREQQFNSTYRVVSVLP | canine IgG-D Fc |
| | IEHQDWLTGKEFKCRVNHIGLPSPIERTISKARGQAHQP | Protein A− |
| | SVYVLPPSPKELSSSDTVTLTCLIKDFFPPEIDVEWQSN | C1q− |
| | GQPEPESKYHTTAPQLDEDGSYFLYSKLSVDKSRWQQGD | CD16− |
| | TFTCAVMHEALQNHYTDLSLSHSPGK | |
| 168 | PVPEPLGGPSVLIFPPKPKDTLLIARTPEVTCVVLDLGR | Exemplary variant |
| | EDPEVQISWFVDGKEVHTAKTQSREQQFNGTYRVVSVLP | canine IgG-A Fc |
| | IGHQDWLTGKEFKCRVNHIDLPSPIERTISKARGRAHKP | C1q− |
| | SVYVLPPSPKELSSSDTVSITCLIKDFYPPDIDVEWQSN | Protein A+ |
| | GQQEPERKHRMTPPQLDEDGSYFLYSKLSVDKSRWQQGD | I(21)T |
| | PFTCAVMHEALHNHYTDLSLSHSPGK | R(23)L |
| | | T(25)A |
| | | E(80)G |
| | | T(205)A |
| | | Q(207)H |
| 169 | PVPEPLGGPSVLIFPPKPKDTLRITRTPEVTCVVLDLGR | Exemplary variant |
| | EDPEVQISWFVDGKEVHTAKTQSREQQFNGTYRVVSVLP | canine IgG-A Fc |
| | IEHQDWLTGKEFKCRVNHIDLPSPIERTISKARGRAHKP | C1q− |
| | SVYVLPPSPKELSSSDTVSITCLIKDFYPPDIDVEWQSN | Protein A+ |
| | GQQEPERKHRMTPPQLDEDGSYFLYSKLSVDKSRWQQGD | I(21)T |
| | PFTCAVMHETLHNHYTDLSLSHSPGK | Q(207)H |
| 170 | PAPEMLGGPSVFIFPPKPKDTLLIARTPEVTCVVVDLDP | Exemplary variant |
| | EDPEVQISWFVDGKQMQTAKTQPREEQFNGTYRVVSVLP | canine IgG-B Fc |
| | IGHQDWLKGKQFTCRVNNKALPSPIERTISKARGQAHQP | Protein A+ |
| | SVYVLPPSREELSKNTVSLTCLIKDFFPPDIDVEWQSNG | C1q− |
| | QQEPESKYRTTPPQLDEDGSYFLYSKLSVDKSRWQRGDT | K(93)R |
| | FICAVMHEALHNHYTQESLSHSPGK | |
| 171 | PAPEPLGGPSVFIFPPKPKDTLLIARTPEVTCVVVDLDP | Exemplary variant |
| | EDPEVQISWFVDGKQMQTAKTQPREEQFNGTYRVVSVLP | canine IgG-B Fc |
| | IGHQDWLKGKQFTCKVNNKALPSPIERTISKARGQAHQP | Protein A+ |
| | SVYVLPPSREELSKNTVSLTCLIKDFFPPDIDVEWQSNG | C1q+ |
| | QQEPESKYRTTPPQLDEDGSYFLYSKLSVDKSRWQRGDT | CD16− |
| | FICAVMHEALHNHYTQESLSHSPGK | M(5)P |
| 172 | PAPEMLGGPSVFIFPPKPKDTLLIARTPEVTCVVVDLDR | Exemplary variant |
| | EDPEVQISWFVDGKQMQTAKTQPREEQFNGTYRVVSVLP | canine IgG-B Fc |
| | IGHQDWLKGKQFTCKVNNKALPSPIERTISKARGQAHQP | Protein A+ |
| | SVYVLPPSREELSKNTVSLTCLIKDFFPPDIDVEWQSNG | C1q+ |
| | QQEPESKYRITPPQLDEDGSYFLYSKLSVDKSRWQRGDT | CD16− |
| | FICAVMHEALHNHYTQESLSHSPGK | P(39)R |
| 173 | PAPEMLGGPSVFIFPPKPKDTLLIARTPEVTCVVVDLGP | Exemplary variant |
| | EDPEVQISWFVDGKQMQTAKTQPREEQFNGTYRVVSVLP | canine IgG-B Fc |
| | IGHQDWLKGKQFTCKVNNKALPSPIERTISKARGQAHQP | Protein A+ |
| | SVYVLPPSREELSKNTVSLTCLIKDFFPPDIDVEWQSNG | Clq+ |
| | QQEPESKYRTTPPQLDEDGSYFLYSKLSVDKSRWQRGDT | CD16− |
| | FICAVMHEALHNHYTQESLSHSPGK | D(38)G |
| 174 | PAPEMLGGPSVFIFPPKPKDTLLIARTPEVTCVVVDLDP | Exemplary variant |
| | EDPEVQISWFVDGKQMQTAKTQPREEQFNGTYRVVSVLP | canine IgG-B Fc |
| | IGHQDWLKGKQFTCKVNNIALPSPIERTISKARGQAHQP | Protein A+ |
| | SVYVLPPSREELSKNTVSLTCLIKDFFPPDIDVEWQSNG | C1q+ |
| | QQEPESKYRTTPPQLDEDGSYFLYSKLSVDKSRWQRGDT | CD16− |
| | FICAVMHEALHNHYTQESLSHSPGK | K(97)I |
| 175 | PAPEMLGGPSVFIFPPKPKDTLLIARTPEVTCVVVDLDP | Exemplary variant |
| | EDPEVQISWFVDGKQMQTAKTQPREEQFNGTYRVVSVLP | canine IgG-B Fc |
| | IGHQDWLKGKQFTCKVNNKGLPSPIERTISKARGQAHQP | Protein A+ |
| | SVYVLPPSREELSKNTVSLTCLIKDFFPPDIDVEWQSNG | C1q+ |
| | QQEPESKYRTTPPQLDEDGSYFLYSKLSVDKSRWQRGDT | CD16− |
| | FICAVMHEALHNHYTQESLSHSPGK | A(98)G |
| 176 | PAPEMLGGPSVFIFPPKPKDTLLIARTPEVTCVVVDLGP | Exemplary variant |
| | EDPEVQISWFVDGKQMQTAKTQPREEQFNGTYRVVSVLP | canine IgG-B Fc |
| | IGHQDWLKGKQFTCKVNNIGLPSPIERTISKARGQAHQP | Protein A+ |
| | SVYVLPPSREELSKNTVSLTCLIKDFFPPDIDVEWQSNG | C1q+ |
| | QQEPESKYRTTPPQLDEDGSYFLYSKLSVDKSRWQRGDT | CD16− |
| | FICAVMHEALHNHYTQESLSHSPGK | D(38)G |
| | | K(97)I |
| | | A(98)G |
| 177 | PAPEMLGGPSVFIFPPKPKDTLLIARTPEVTCVVVDLGP | Exemplary variant |
| | EDPEVQISWFVDGKQMQTAKTQPREEQFNGTYRVVSVLP | canine IgG-B Fc |
| | IGHQDWLKGKQFTCRVNNIGLPSPIERTISKARGQAHQP | Protein A+ |
| | SVYVLPPSREELSKNTVSLTCLIKDFFPPDIDVEWQSNG | C1q− |
| | QQEPESKYRTTPPQLDEDGSYFLYSKLSVDKSRWQRGDT | CD16− |
| | FICAVMHEALHNHYTQESLSHSPGK | D(38)G |
| | | K(93)R |
| | | K(97)I |
| | | A(98)G |
| 178 | PAPEPLGGPSVFIFPPKPKDTLLIARTPEVTCVVVDLDR | Exemplary variant |
| | EDPEVQISWFVDGKQMQTAKTQPREEQFNGTYRVVSVLP | canine IgG-B Fc |
| | IGHQDWLKGKQFTCKVNNKALPSPIERTISKARGQAHQP | Protein A+ |
| | SVYVLPPSREELSKNTVSLTCLIKDFFPPDIDVEWQSNG | C1q+ |
| | QQEPESKYRTTPPQLDEDGSYFLYSKLSVDKSRWQRGDT | CD16− |
| | FICAVMHEALHNHYTQESLSHSPGK | M(5)P |
| | | P(39)R |
| 179 | PAPEPLGGPSVFIFPPKPKDTLLIARTPEVTCVVVDLDR | Exemplary variant |
| | EDPEVQISWFVDGKQMQTAKTQPREEQFNGTYRVVSVLP | canine IgG-B Fc |
| | IGHQDWLKGKQFTCRVNNKALPSPIERTISKARGQAHQP | Protein A+ |
| | SVYVLPPSREELSKNTVSLTCLIKDFFPPDIDVEWQSNG | C1q− |
| | QQEPESKYRTTPPQLDEDGSYFLYSKLSVDKSRWQRGDT | CD16− |
| | FICAVMHEALHNHYTQESLSHSPGK | M(5)P |
| | | P(39)R |
| | | K(93)R |
| 180 | PGCGLLGGPSVFIFPPKPKDTLLIARTPTVTCVVVDLDP | Exemplary variant |
| | ENPEVQISWFVDSKQVQTANTQPREEQSNGTYRVVSVLP | canine IgG-C Fc |
| | IGHQDWLSGKQFKCKVNNKALPSPIEEIISKTPGQAHQP | C1q+ |
| | NVYVLPPSRDEMSKNTVTLTCLVKDFFPPEIDVEWQSNG | Protein A+ |
| | QQEPESKYRMTPPQLDEDGSYFLYSKLSVDKSRWQRGDT | I(21)T |
| | FICAVMHEALHNHYTQISLSHSPGK | V(23)L |
| | | T(24)I |
| 181 | PGCGLLGGPSVFIFPPKPKDTLVTARTPTVTCVVVDLDP | Exemplary variant |
| | ENPEVQISWFVDSKQVQTANTQPREEQSNGTYRVVSVLP | canine IgG-C Fc |
| | IGHQDWLSGKQFKCKVNNKALPSPIEEIISKTPGQAHQP | C1q+ |
| | NVYVLPPSRDEMSKNTVTLTCLVKDFFPPEIDVEWQSNG | Protein A+ |
| | QQEPESKYRMTPPQLDEDGSYFLYSKLSVDKSRWQRGDT | I(21)T |
| | FICAVMHEALHNHYTQISLSHSPGK | |
| 182 | PGCGLLGGPSVFIFPPKPKDILVTARTPTVTCVVVDLDP | Exemplary variant |
| | ENPEVQISWFVDSKQVQTANTQPREEQSNGTYRVVSVLP | canine IgG-C Fc |
| | IGHQDWLSGKQFKCRVNNKALPSPIEEIISKTPGQAHQP | Protein A- |
| | NVYVLPPSRDEMSKNTVTLTCLVKDFFPPEIDVEWQSNG | C1q− |
| | QQEPESKYRMTPPQLDEDGSYFLYSKLSVDKSRWQRGDT | K(93)R |
| | FICAVMHEALHNHYTQISLSHSPGK | |
| 183 | PGCGLLGGPSVFIFPPKPKDTLLIARTPTVTCVVVDLDP | Exemplary variant |
| | ENPEVQISWFVDSKQVQTANTQPREEQSNGTYRVVSVLP | canine IgG-C Fc |
| | IGHQDWLSGKQFKCRVNNKALPSPIEEIISKTPGQAHQP | C1q− |
| | NVYVLPPSRDEMSKNTVTLTCLVKDFFPPEIDVEWQSNG | K(93)R |
| | QQEPESKYRMTPPQLDEDGSYFLYSKLSVDKSRWQRGDT | Protein A+ |
| | FICAVMHEALHNHYTQISLSHSPGK | I(21)T |
| | | V(23)L |
| | | T(24)I |
| 184 | PGCGPLGGPSVFIFPPKPKDILVTARTPTVTCVVVDLDP | Exemplary variant |
| | ENPEVQISWFVDSKQVQTANTQPREEQSNGTYRVVSVLP | canine IgG-C Fc |
| | IGHQDWLSGKQFKCKVNNKALPSPIEEIISKTPGQAHQP | Protein A+ |
| | NVYVLPPSRDEMSKNTVTLTCLVKDFFPPEIDVEWQSNG | C1q+ |
| | QQEPESKYRMTPPQLDEDGSYFLYSKLSVDKSRWQRGDT | CD16 |
| | FICAVMHEALHNHYTQISLSHSPGK | L(5)P |
| 185 | PGCGLLGGPSVFIFPPKPKDILVTARTPTVTCVVVDLDR | Exemplary variant |
| | ENPEVQISWFVDSKQVQTANTQPREEQSNGTYRVVSVLP | canine IgG-C Fc |
| | IGHQDWLSGKQFKCKVNNKALPSPIEEIISKTPGQAHQP | Protein A+ |
| | NVYVLPPSRDEMSKNTVTLTCLVKDFFPPEIDVEWQSNG | C1q+ |
| | QQEPESKYRMTPPQLDEDGSYFLYSKLSVDKSRWQRGDT | CD16− |
| | FICAVMHEALHNHYTQISLSHSPGK | P(39)R |
| 186 | PGCGLLGGPSVFIFPPKPKDILVTARTPTVTCVVVDLGP | Exemplary variant |
| | ENPEVQISWFVDSKQVQTANTQPREEQSNGTYRVVSVLP | canine IgG-C Fc |
| | IGHQDWLSGKQFKCKVNNKALPSPIEEIISKTPGQAHQP | Protein A+ |
| | NVYVLPPSRDEMSKNTVTLTCLVKDFFPPEIDVEWQSNG | C1q+ |
| | QQEPESKYRMTPPQLDEDGSYFLYSKLSVDKSRWQRGDT | CD16− |
| | FICAVMHEALHNHYTQISLSHSPGK | D(38)G |
| 187 | PGCGLLGGPSVFIFPPKPKDILVTARTPTVTCVVVDLDP | Exemplary variant |
| | ENPEVQISWFVDSKQVQTANTQPREEQSNGTYRVVSVLP | canine IgG-C Fc |
| | IGHQDWLSGKQFKCKVNNIALPSPIEEIISKTPGQAHQP | Protein A+ |
| | NVYVLPPSRDEMSKNTVTLTCLVKDFFPPEIDVEWQSNG | C1q+ |
| | QQEPESKYRMTPPQLDEDGSYFLYSKLSVDKSRWQRGDT | CD16− |
| | FICAVMHEALHNHYTQISLSHSPGK | K(97)I |
| 188 | PGCGLLGGPSVFIFPPKPKDILVTARTPTVTCVVVDLDP | Exemplary variant |
| | ENPEVQISWFVDSKQVQTANTQPREEQSNGTYRVVSVLP | canine IgG-C Fc |
| | IGHQDWLSGKQFKCKVNNKGLPSPIEEIISKTPGQAHQP | Protein A+ |
| | NVYVLPPSRDEMSKNTVTLTCLVKDFFPPEIDVEWQSNG | C1q+ |
| | QQEPESKYRMTPPQLDEDGSYFLYSKLSVDKSRWQRGDT | CD16− |
| | FICAVMHEALHNHYTQISLSHSPGK | A(98)G |
| 189 | PGCGLLGGPSVFIFPPKPKDILVTARTPTVTCVVVDLGP | Exemplary variant |
| | ENPEVQISWFVDSKQVQTANTQPREEQSNGTYRVVSVLP | canine IgG-C Fc |
| | IGHQDWLSGKQFKCKVNNIGLPSPIEEIISKTPGQAHQP | Protein A+ |
| | NVYVLPPSRDEMSKNTVTLTCLVKDFFPPEIDVEWQSNG | C1q+ |
| | QQEPESKYRMTPPQLDEDGSYFLYSKLSVDKSRWQRGDT | CD16− |
| | FICAVMHEALHNHYTQISLSHSPGK | D(38)G |
| | | K(97)I |
| | | A(98)G |
| 190 | PGCGLLGGPSVFIFPPKPKDILVTARTPTVTCVVVDLGP | Exemplary variant |
| | ENPEVQISWFVDSKQVQTANTQPREEQSNGTYRVVSVLP | canine IgG-C Fc |
| | IGHQDWLSGKQFKCRVNNIGLPSPIEEIISKTPGQAHQP | Protein A+ |
| | NVYVLPPSRDEMSKNTVTLTCLVKDFFPPEIDVEWQSNG | Clq− |
| | QQEPESKYRMTPPQLDEDGSYFLYSKLSVDKSRWQRGDT | CD16− |
| | FICAVMHEALHNHYTQISLSHSPGK | D(38)G |
| | | K(93)R |
| | | K(97)I |
| | | A(98)G |
| 191 | PGCGPLGGPSVFIFPPKPKDILVTARTPTVTCVVVDLDR | Exemplary variant |
| | ENPEVQISWFVDSKQVQTANTQPREEQSNGTYRVVSVLP | canine IgG-C Fc |
| | IGHQDWLSGKQFKCKVNNKALPSPIEEIISKTPGQAHQP | Protein A+ |
| | NVYVLPPSRDEMSKNTVTLTCLVKDFFPPEIDVEWQSNG | C1q+ |
| | QQEPESKYRMTPPQLDEDGSYFLYSKLSVDKSRWQRGDT | CD16− |
| | FICAVMHEALHNHYTQISLSHSPGK | L(5)P |
| | | P(39)R |
| 192 | PGCGPLGGPSVFIFPPKPKDILVTARTPTVTCVVVDLDR | Exemplary variant |
| | ENPEVQISWFVDSKQVQTANTQPREEQSNGTYRVVSVLP | canine IgG-C Fc |
| | IGHQDWLSGKQFKCRVNNKALPSPIEEIISKTPGQAHQP | Protein A+ |
| | NVYVLPPSRDEMSKNTVTLTCLVKDFFPPEIDVEWQSNG | C1q− |
| | QQEPESKYRMTPPQLDEDGSYFLYSKLSVDKSRWQRGDT | CD16− |
| | FICAVMHEALHNHYTQISLSHSPGK | M(5)P |
| | | P(39)R |
| | | K(93)R |
| 193 | PVPESLGGPSVFIFPPKPKDTLLIARTPEITCVVLDLGR | Exemplary variant |
| | EDPEVQISWFVDGKEVHTAKTQPREQQFNSTYRVVSVLP | canine IgG-D Fc |
| | IGHQDWLTGKEFKCRVNHIGLPSPIERTISKARGQAHQP | C1q− |
| | SVYVLPPSPKELSSSDTVTLTCLIKDFFPPEIDVEWQSN | Protein A+ |
| | GQPEPESKYHTTAPQLDEDGSYFLYSKLSVDKSRWQQGD | I(21)T |
| | TFTCAVMHEALHNHYTDLSLSHSPGK | R(23)L |
| | | T(25)A |
| | | E(80)G |
| | | Q(207)H |
| 194 | PVPESLGGPSVFIFPPKPKDTLRITRTPEITCVVLDLGR | Exemplary variant |
| | EDPEVQISWFVDGKEVHTAKTQPREQQFNSTYRVVSVLP | canine IgG-D Fc |
| | IEHQDWLTGKEFKCRVNHIGLPSPIERTISKARGQAHQP | C1q− |
| | SVYVLPPSPKELSSSDTVTLTCLIKDFFPPEIDVEWQSN | Protein A+ |
| | GQPEPESKYHTTAPQLDEDGSYFLYSKLSVDKSRWQQGD | I(21)T |
| | TFTCAVMHEALHNHYTDLSLSHSPGK | Q(207)H |
| 195 | PVPEPLGGPSVLIFPPKPKDILRITRTPEVTCVVLDLGR | Exemplary variant |
| | EDPEVQISWFVDGKEVHTAKTQSREQQFNGTYRVVSVLP | canine IgG-A Fc |
| | IEHQDWLTGKEFKCRVNHIDLPSPIERTISKARGRAHKP | Bispecific knob |
| | SVYVLPPSPKELSSSDTVSIWCLIKDFYPPDIDVEWQSN | T(138)W |
| | GQQEPERKHRMTPPQLDEDGSYFLYSKLSVDKSRWQQGD | |
| | PFTCAVMHETLQNHYTDLSLSHSPGK | |
| 196 | PAPEMLGGPSVFIFPPKPKDTLLIARTPEVTCVVVDLDP | Exemplary variant |
| | EDPEVQISWFVDGKQMQTAKTQPREEQFNGTYRVVSVLP | canine IgG-B Fc |
| | IGHQDWLKGKQFTCKVNNKALPSPIERTISKARGQAHQP | Bispecific knob |
| | SVYVLPPSREELSKNTVSLWCLIKDFFPPDIDVEWQSNG | T(137)W |
| | QQEPESKYRTTPPQLDEDGSYFLYSKLSVDKSRWQRGDT | |
| | FICAVMHEALHNHYTQESLSHSPGK | |
| 197 | PGCGLLGGPSVFIFPPKPKDILVTARTPTVTCVVVDLDP | Exemplary variant |
| | ENPEVQISWFVDSKQVQTANTQPREEQSNGTYRVVSVLP | canine IgG-C Fc |
| | IGHQDWLSGKQFKCKVNNKALPSPIEEIISKTPGQAHQP | Bispecific knob |
| | NVYVLPPSRDEMSKNTVTLWCLVKDFFPPEIDVEWQSNG | T(137)W |
| | QQEPESKYRMTPPQLDEDGSYFLYSKLSVDKSRWQRGDT | |
| | FICAVMHEALHNHYTQISLSHSPGK | |
| 198 | PVPESLGGPSVFIFPPKPKDILRITRTPEITCVVLDLGR | Exemplary variant |
| | EDPEVQISWFVDGKEVHTAKTQPREQQFNSTYRVVSVLP | canine IgG-D Fc |
| | IEHQDWLTGKEFKCRVNHIGLPSPIERTISKARGQAHQP | Bispecific knob |
| | SVYVLPPSPKELSSSDTVTLWCLIKDFFPPEIDVEWQSN | T(138)W |
| | GQPEPESKYHTTAPQLDEDGSYFLYSKLSVDKSRWQQGD | |
| | TFTCAVMHEALQNHYTDLSLSHSPGK | |
| 199 | PVPEPLGGPSVLIFPPKPKDILRITRTPEVTCVVLDLGR | Exemplary variant |
| | EDPEVQISWFVDGKEVHTAKTQSREQQFNGTYRVVSVLP | canine IgG-A Fc |
| | IEHQDWLTGKEFKCRVNHIDLPSPIERTISKARGRAHKP | Bispecific hole |
| | SVYVLPPSPKELSSSDTVSISCAIKDFYPPDIDVEWQSN | T(138)S |
| | GQQEPERKHRMTPPQLDEDGSYFLYSKLSVDKSRWQQGD | L(140)A |
| | PFTCAVMHETLQNHYTDLSLSHSPGK | |
| 200 | PAPEMLGGPSVFIFPPKPKDTLLIARTPEVTCVVVDLDP | Exemplary variant |
| | EDPEVQISWFVDGKQMQTAKTQPREEQFNGTYRVVSVLP | canine IgG-B Fc |
| | IGHQDWLKGKQFTCKVNNKALPSPIERTISKARGQAHQP | Bispecific hole |
| | SVYVLPPSREELSKNTVSLSCAIKDFFPPDIDVEWQSNG | T(137)S |
| | QQEPESKYRTTPPQLDEDGSYFLYSKLSVDKSRWQRGDT | L(139)A |
| | FICAVMHEALHNHYTQESLSHSPGK | |
| 201 | PGCGLLGGPSVFIFPPKPKDILVTARTPTVTCVVVDLDP | Exemplary variant |
| | ENPEVQISWFVDSKQVQTANTQPREEQSNGTYRVVSVLP | canine IgG-C Fc |
| | IGHQDWLSGKQFKCKVNNKALPSPIEEIISKTPGQAHQP | Bispecific hole |
| | NVYVLPPSRDEMSKNTVTLSCAVKDFFPPEIDVEWQSNG | T(137)S |
| | QQEPESKYRMTPPQLDEDGSYFLYSKLSVDKSRWQRGDT | L(139)A |
| | FICAVMHEALHNHYTQISLSHSPGK | |
| 202 | PVPESLGGPSVFIFPPKPKDILRITRTPEITCVVLDLGR | Exemplary variant |
| | EDPEVQISWFVDGKEVHTAKTQPREQQFNSTYRVVSVLP | canine IgG-D Fc |
| | IEHQDWLTGKEFKCRVNHIGLPSPIERTISKARGQAHQP | Bispecific hole |
| | SVYVLPPSPKELSSSDTVTLSCAIKDFFPPEIDVEWQSN | T(138)S |
| | GQPEPESKYHTTAPQLDEDGSYFLYSKLSVDKSRWQQGD | L(140)A |
| | TFTCAVMHEALQNHYTDLSLSHSPGK | |
| 203 | RKTDHPPGPKPCDCPKCPPPEMLGGPSIFIFPPKPKDTL | Exemplary wild-type |
| | SISRTPEVTCLVVDLGPDDSDVQITWFVDNTQVYTAKTS | feline IgG1a Fc |
| | PREEQFNSTYRVVSVLPILHQDWLKGKEFKCKVNSKSLP | Protein A+ |
| | SPIERTISKAKGQPHEPQVYVLPPAQEELSENKVSVTCL | C1q+ |
| | IKSFHPPDIAVEWEITGQPEPENNYRTTPPQLDSDGTYF | |
| | VYSKLSVDRSHWQRGNTYTCSVSHEALHSHHTQKSLTQS | |
| | PGK | |
| 204 | RKTDHPPGPKTGEGPKCPPPEMLGGPSIFIFPPKPKDTL | Exemplary wild-type |
| | SISRTPEVTCLVVDLGPDDSDVQITWFVDNTQVYTAKTS | feline IgG1a Fc |
| | PREEQFNSTYRVVSVLPILHQDWLKGKEFKCKVNSKSLP | Protein A+ |
| | SPIERTISKAKGQPHEPQVYVLPPAQEELSENKVSVTCL | C1q+ |
| | IKSFHPPDIAVEWEITGQPEPENNYRTTPPQLDSDGTYF | |
| | VYSKLSVDRSHWQRGNTYTCSVSHEALHSHHTQKSLTQS | |
| | PGK | |
| 205 | RKTDHPPGPKPCDCPKCPPPEMLGGPSIFIFPPKPKDTL | Exemplary wild-type |
| | SISRTPEVTCLVVDLGPDDSDVQITWFVDNTQVYTAKTS | feline IgG1b Fc |
| | PREEQFNSTYRVVSVLPILHQDWLKGKEFKCKVNSKSLP | Protein A+ |
| | SPIERTISKDKGQPHEPQVYVLPPAQEELSENKVSVTCL | C1q+ |
| | IEGFYPSDIAVEWEITGQPEPENNYRTTPPQLDSDGTYF | |
| | LYSRLSVDRSRWQRGNTYTCSVSHEALHSHHTQKSLTQS | |
| | PGK | |
| 206 | RKTDHPPGPKTGEGPKCPPPEMLGGPSIFIFPPKPKDTL | Exemplary wild-type |
| | SISRTPEVTCLVVDLGPDDSDVQITWFVDNTQVYTAKTS | feline IgG1b Fc |
| | PREEQFNSTYRVVSVLPILHQDWLKGKEFKCKVNSKSLP | Protein A+ |
| | SPIERTISKDKGQPHEPQVYVLPPAQEELSENKVSVTCL | C1q+ |
| | IEGFYPSDIAVEWEITGQPEPENNYRTTPPQLDSDGTYF | |
| | LYSRLSVDRSRWQRGNTYTCSVSHEALHSHHTQKSLTQS | |
| | PGK | |
| 207 | PKTASTIESKTGEGPKCPVPEIPGAPSVFIFPPKPKDTL | Exemplary wild-type |
| | SISRTPEVTCLVVDLGPDDSNVQITWFVDNTEMHTAKTR | feline IgG2 Fc |
| | PREEQFNSTYRVVSVLPILHQDWLKGKEFKCKVNSKSLP | Protein A+ |
| | SAMERTISKAKGQPHEPQVYVLPPTQEELSENKVSVTCL | C1q− |
| | IKGFHPPDIAVEWEITGQPEPENNYQTTPPQLDSDGTYF | |
| | LYSRLSVDRSHWQRGNTYTCSVSHEALHSHHTQKSLTQS | |
| | PGK | |
| 208 | RKTDHPPGPKPCDCPPCPPPEMLGGPSIFIFPPKPKDTL | Exemplary variant feline |
| | SISRTPEVTCLVVDLGPDDSDVQITWFVDNTQVYTAKTS | IgG1a Fc with modified |
| | PREEQFNSTYRVVSVLPILHQDWLKGKEFKCKVNSKSLP | hinge |
| | SPIERTISKAKGQPHEPQVYVLPPAQEELSENKVSVTCL | K(16)P |
| | IKSFHPPDIAVEWEITGQPEPENNYRTTPPQLDSDGTYF | |
| | VYSKLSVDRSHWQRGNTYTCSVSHEALHSHHTQKSLTQS | |
| | PGK | |
| 209 | RKTDHPPGPKPCDCPKCPPPEMLGGPSIFIFPPKPKDTL | Exemplary variant feline |
| | SISRTPEVTCLVVDLGPDDSDVQITWFVDNTQVYTAKTS | IgG1a Fc |
| | PREEQFNSTYRVVSVLPILHQDWLKGKEFKCKVNSKSLP | Protein A+ |
| | SPIERTISKAKGQPHEPQVYVLPPAQEELSENKVSVTCL | C1q− |
| | IKSFHPPDIAVEWEITGQPEPENNYRTTPPQLDSDGTYF | P(198)A |
| | VYSKLSVDRSHWQRGNTYTCSVSHEALHSHHTQKSLTQS | |
| | PGK | |
| 210 | RKTDHPPGPKTGEGPKCPPPEMLGGPSIFIFPPKPKDTL | Exemplary variant feline |
| | SISRTPEVTCLVVDLGPDDSDVQITWFVDNTQVYTAKTS | IgG1a Fc |
| | PREEQFNSTYRVVSVLPILHQDWLKGKEFKCKVNSKSLP | Protein A+ |
| | SPIERTISKAKGQPHEPQVYVLPPAQEELSENKVSVTCL | C1q− |
| | IKSFHPPDIAVEWEITGQPEPENNYRTTPPQLDSDGTYF | P(198)A |
| | VYSKLSVDRSHWQRGNTYTCSVSHEALHSHHTQKSLTQS | |
| | PGK | |
| 211 | RKTDHPPGPKPCDCPPCPPPEMLGGPSIFIFPPKPKDTL | Exemplary variant feline |
| | SISRTPEVTCLVVDLGPDDSDVQITWFVDNTQVYTAKTS | IgG1b Fc with modified |
| | PREEQFNSTYRVVSVLPILHQDWLKGKEFKCKVNSKSLP | hinge |
| | SPIERTISKDKGQPHEPQVYVLPPAQEELSENKVSVTCL | K(16)P |
| | IEGFYPSDIAVEWEITGQPEPENNYRTTPPQLDSDGTYF | |
| | LYSRLSVDRSRWQRGNTYTCSVSHEALHSHHTQKSLTQS | |
| | PGK | |
| 212 | RKTDHPPGPKPCDCPKCPPPEMLGGPSIFIFPPKPKDTL | Exemplary variant feline |
| | SISRTPEVTCLVVDLGPDDSDVQITWFVDNTQVYTAKTS | IgG1b Fc |
| | PREEQFNSTYRVVSVLPILHQDWLKGKEFKCKVNSKSLP | Protein A+ |
| | SPIERTISKDKGQPHEPQVYVLPPAQEELSENKVSVTCL | Clq− |
| | IEGFYPSDIAVEWEITGQPEPENNYRTTPPQLDSDGTYF | P(198)A |
| | LYSRLSVDRSRWQRGNTYTCSVSHEALHSHHTQKSLTQS | |
| | PGK | |
| 213 | RKTDHPPGPKTGEGPKCPPPEMLGGPSIFIFPPKPKDTL | Exemplary variant feline |
| | SISRTPEVTCLVVDLGPDDSDVQITWFVDNTQVYTAKTS | IgG1b Fc |
| | PREEQFNSTYRVVSVLPILHQDWLKGKEFKCKVNSKSLP | Protein A+ |
| | SPIERTISKDKGQPHEPQVYVLPPAQEELSENKVSVTCL | C1q− |
| | IEGFYPSDIAVEWEITGQPEPENNYRTTPPQLDSDGTYF | P(198)A |
| | LYSRLSVDRSRWQRGNTYTCSVSHEALHSHHTQKSLTQS | |
| | PGK | |
| 214 | PKTASTIESKTGECPKCPVPEIPGAPSVFIFPPKPKDTL | Exemplary variant feline |
| | SISRTPEVTCLVVDLGPDDSNVQITWFVDNTEMHTAKTR | IgG2 Fc with modified |
| | PREEQFNSTYRVVSVLPILHQDWLKGKEFKCKVNSKSLP | hinge |
| | SAMERTISKAKGQPHEPQVYVLPPTQEELSENKVSVTCL | Hinge Cys |
| | IKGFHPPDIAVEWEITGQPEPENNYQTTPPQLDSDGTYF | G(14)C |
| | LYSRLSVDRSHWQRGNTYTCSVSHEALHSHHTQKSLTQS | |
| | PGK | |
| 215 | PKTASTIESKTGEGPPCPVPEIPGAPSVFIFPPKPKDTL | Exemplary variant feline |
| | SISRTPEVTCLVVDLGPDDSNVQITWFVDNTEMHTAKTR | IgG2 Fc with modified |
| | PREEQFNSTYRVVSVLPILHQDWLKGKEFKCKVNSKSLP | hinge |
| | SAMERTISKAKGQPHEPQVYVLPPTQEELSENKVSVTCL | K(16)P |
| | IKGFHPPDIAVEWEITGQPEPENNYQTTPPQLDSDGTYF | |
| | LYSRLSVDRSHWQRGNTYTCSVSHEALHSHHTQKSLTQS | |
| | PGK | |
| 216 | RKTDHPPGPKPCDCPKCPPPEMLGGPSVFIFPPKPKDTL | Exemplary variant feline |
| | SISRTPEVTCLVVDLGPDDSNVQITWFVDNTEMHTAKTR | IgG2 Fc with feline |
| | PREEQFNSTYRVVSVLPILHQDWLKGKEFKCKVNSKSLP | IgG1 hinge |
| | SAMERTISKAKGQPHEPQVYVLPPTQEELSENKVSVTCL | |
| | IKGFHPPDIAVEWEITGQPEPENNYQTTPPQLDSDGTYF | |
| | LYSRLSVDRSHWQRGNTYTCSVSHEALHSHHTQKSLTQS | |
| | PGK | |
| 217 | RKTDHPPGPKPCDCPKCPPPEMLGGPSIFIFPPKPKDTL | Exemplary variant feline |
| | SISRTPEVTCLVVDLGPDDSDVQITWFVDNTQVYTAKTS | IgG1a Fc |
| | PREEQFNSTYRVVSVLPILHQDWLKGKEFKCKVNSKSLP | Bispecific knob |
| | SPIERTISKAKGQPHEPQVYVLPPAQEELSENKVSVWCL | T(154)W |
| | IKSFHPPDIAVEWEITGQPEPENNYRTTPPQLDSDGTYF | |
| | VYSKLSVDRSHWQRGNTYTCSVSHEALHSHHTQKSLTQS | |
| | PGK | |
| 218 | RKTDHPPGPKTGEGPKCPPPEMLGGPSIFIFPPKPKDTL | Exemplary variant feline |
| | SISRTPEVTCLVVDLGPDDSDVQITWFVDNTQVYTAKTS | IgG1a Fc |
| | PREEQFNSTYRVVSVLPILHQDWLKGKEFKCKVNSKSLP | Bispecific knob |
| | SPIERTISKAKGQPHEPQVYVLPPAQEELSENKVSVWCL | T(154)W |
| | IKSFHPPDIAVEWEITGQPEPENNYRTTPPQLDSDGTYF | |
| | VYSKLSVDRSHWQRGNTYTCSVSHEALHSHHTQKSLTQS | |
| | PGK | |
| 219 | RKTDHPPGPKPCDCPKCPPPEMLGGPSIFIFPPKPKDTL | Exemplary variant feline |
| | SISRTPEVTCLVVDLGPDDSDVQITWFVDNTQVYTAKTS | IgG1b Fc |
| | PREEQFNSTYRVVSVLPILHQDWLKGKEFKCKVNSKSLP | Bispecific knob |
| | SPIERTISKDKGQPHEPQVYVLPPAQEELSENKVSVWCL | T(154)W |
| | IEGFYPSDIAVEWEITGQPEPENNYRTTPPQLDSDGTYF | |
| | LYSRLSVDRSRWQRGNTYTCSVSHEALHSHHTQKSLTQS | |
| | PGK | |
| 220 | RKTDHPPGPKTGEGPKCPPPEMLGGPSIFIFPPKPKDTL | Exemplary variant feline |
| | SISRTPEVTCLVVDLGPDDSDVQITWFVDNTQVYTAKTS | IgG1b Fc |
| | PREEQFNSTYRVVSVLPILHQDWLKGKEFKCKVNSKSLP | Bispecific knob |
| | SPIERTISKDKGQPHEPQVYVLPPAQEELSENKVSVWCL | T(154)W |
| | IEGFYPSDIAVEWEITGQPEPENNYRTTPPQLDSDGTYF | |
| | LYSRLSVDRSRWQRGNTYTCSVSHEALHSHHTQKSLTQS | |
| | PGK | |
| 221 | PKTASTIESKTGEGPKCPVPEIPGAPSVFIFPPKPKDTL | Exemplary variant feline |
| | SISRTPEVTCLVVDLGPDDSNVQITWFVDNTEMHTAKTR | IgG2 Fc |
| | PREEQFNSTYRVVSVLPILHQDWLKGKEFKCKVNSKSLP | Bispecific knob |
| | SAMERTISKAKGQPHEPQVYVLPPTQEELSENKVSVWCL | T(154)W |
| | IKGFHPPDIAVEWEITGQPEPENNYQTTPPQLDSDGTYF | |
| | LYSRLSVDRSHWQRGNTYTCSVSHEALHSHHTQKSLTQS | |
| | PGK | |
| 222 | RKTDHPPGPKPCDCPKCPPPEMLGGPSIFIFPPKPKDTL | Exemplary variant feline |
| | SISRTPEVTCLVVDLGPDDSDVQITWFVDNTQVYTAKTS | IgG1a Fc |
| | PREEQFNSTYRVVSVLPILHQDWLKGKEFKCKVNSKSLP | Bispecific hole |
| | SPIERTISKAKGQPHEPQVYVLPPAQEELSENKVSVSCA | T(154)S |
| | IKSFHPPDIAVEWEITGQPEPENNYRTTPPQLDSDGTYF | L(156)A |
| | VYSKLSVDRSHWQRGNTYTCSVSHEALHSHHTQKSLTQS | |
| | PGK | |
| 223 | RKTDHPPGPKTGEGPKCPPPEMLGGPSIFIFPPKPKDTL | Exemplary variant feline |
| | SISRTPEVTCLVVDLGPDDSDVQITWFVDNTQVYTAKTS | IgG1a Fc |
| | PREEQFNSTYRVVSVLPILHQDWLKGKEFKCKVNSKSLP | Bispecific hole |
| | SPIERTISKAKGQPHEPQVYVLPPAQEELSENKVSVSCA | T(154)S |
| | IKSFHPPDIAVEWEITGQPEPENNYRTTPPQLDSDGTYF | L(156)A |
| | VYSKLSVDRSHWQRGNTYTCSVSHEALHSHHTQKSLTQS | |
| | PGK | |
| 224 | RKTDHPPGPKPCDCPKCPPPEMLGGPSIFIFPPKPKDTL | Exemplary variant feline |
| | SISRTPEVTCLVVDLGPDDSDVQITWFVDNTQVYTAKTS | IgG1b Fc |
| | PREEQFNSTYRVVSVLPILHQDWLKGKEFKCKVNSKSLP | Bispecific hole |
| | SPIERTISKDKGQPHEPQVYVLPPAQEELSENKVSVSCA | T(154)S |
| | IEGFYPSDIAVEWEITGQPEPENNYRTTPPQLDSDGTYF | L(156)A |
| | LYSRLSVDRSRWQRGNTYTCSVSHEALHSHHTQKSLTQS | |
| | PGK | |
| 225 | RKTDHPPGPKTGEGPKCPPPEMLGGPSIFIFPPKPKDTL | Exemplary variant feline |
| | SISRTPEVTCLVVDLGPDDSDVQITWFVDNTQVYTAKTS | IgG1b Fc |
| | PREEQFNSTYRVVSVLPILHQDWLKGKEFKCKVNSKSLP | Bispecific hole |
| | SPIERTISKDKGQPHEPQVYVLPPAQEELSENKVSVSCA | T(154)S |
| | IEGFYPSDIAVEWEITGQPEPENNYRTTPPQLDSDGTYF | L(156)A |
| | LYSRLSVDRSRWQRGNTYTCSVSHEALHSHHTQKSLTQS | |
| | PGK | |
| 226 | PKTASTIESKTGEGPKCPVPEIPGAPSVFIFPPKPKDTL | Exemplary variant feline |
| | SISRTPEVTCLVVDLGPDDSNVQITWFVDNTEMHTAKTR | IgG2 Fc |
| | PREEQFNSTYRVVSVLPILHQDWLKGKEFKCKVNSKSLP | Bispecific hole |
| | SAMERTISKAKGQPHEPQVYVLPPTQEELSENKVSVSCA | T(154)S |
| | IKGFHPPDIAVEWEITGQPEPENNYQTTPPQLDSDGTYF | L(156)A |
| | LYSRLSVDRSHWQRGNTYTCSVSHEALHSHHTQKSLTQS | |
| | PGK | |
| 227 | ASTTAPSVFPLAPSCGSTSGSTVALACLVSGYFPEPVTV | Wild-type canine IgG-A |
| | SWNSGSLTSGVHTFPSVLQSSGLHSLSSMVTVPSSRWPS | CH1 |
| | ETFTCNVVHPASNTKVDKPV | |
| 228 | ASTTAPSVFPLAPSCGSTSGSTVALACLVSGYFPEPVTV | Wild-type canine IgG-B |
| | SWNSGSLTSGVHTFPSVLQSSGLYSLSSMVTVPSSRWPS | CH1 |
| | ETFTCNVAHPASKTKVDKPV | |
| 229 | ASTTAPSVFPLAPSCGSQSGSTVALACLVSGYIPEPVTV | Wild-type canine IgG-C |
| | SWNSVSLTSGVHTFPSVLQSSGLYSLSSMVTVPSSRWPS | CH1 |
| | ETFTCNVAHPATNTKVDKPV | |
| 230 | ASTTAPSVFPLAPSCGSTSGSTVALACLVSGYFPEPVTV | Wild-type canine IgG-D |
| | SWNSGSLTSGVHTFPSVLQSSGLYSLSSTVTVPSSRWPS | CH1 |
| | ETFTCNVVHPASNTKVDKPV | |
| 231 | ASTTAPSVFPLAPSCGSTSGSTVLLACLVDGYFPEPVTV | Variant canine IgG-A |
| | SWNSGSLTSGVHTFPSVLQSSGLHSLSSMVTVPSSRWPS | CH1 |
| | ETFTCNVVHPASNTKVDKPV | A(24)L |
| | | S(30)D |
| 232 | ASTTAPSVFPLAPSCGSTSGSTVLLACLVDGYFPEPVTV | Variant canine IgG-B |
| | SWNSGSLTSGVHTFPSVLQSSGLYSLSSMVTVPSSRWPS | CH1 |
| | ETFTCNVAHPASKTKVDKPV | A(24)L |
| | | S(30)D |
| 233 | ASTTAPSVFPLAPSCGSQSGSTVLLACLVDGYIPEPVTV | Variant canine IgG-C |
| | SWNSVSLTSGVHTFPSVLQSSGLYSLSSMVTVPSSRWPS | CH1 |
| | ETFTCNVAHPATNTKVDKPV | A(24)L |
| | | S(30)D |
| 234 | ASTTAPSVFPLAPSCGSTSGSTVLLACLVDGYFPEPVTV | Variant canine IgG-D |
| | SWNSGSLTSGVHTFPSVLQSSGLYSLSSTVTVPSSRWPS | CH1 |
| | ETFTCNVVHPASNTKVDKPV | A(24)L |
| | | S(30)D |
| 235 | RNDAQPAVYLFQPSPDQLHTGSASVVCLLNSFYPKDINV | Wild-type canine κ |
| | KWKVDGVIQDTGIQESVTEQDKDSTYSLSSTLTMSSTEY | constant region |
| | LSHELYSCEITHKSLPSTLIKSFQRSECQRVD | |
| 236 | RNDAQPAVYLAQPSPDQLHTGRASVVCLLNSFYPKDINV | Variant canine κ |
| | KWKVDGVIQDTGIQESVTEQDKDSTYSLSSTLTMSSTEY | constant region |
| | LSHELYSCEITHKSLPSTLIKSFQRSECQRVD | F(11)A |
| | | S(22)R |
| 237 | ASTTAPSVFPLAPSCGTTSGATVALACLVSGYFPEPVTV | Wild-type feline IgG1 |
| | SWNSGALTSGVHTFPAVLQASGLYSLSSMVTVPSSRWLS | CH1 |
| | DTFTCNVAHPPSNTKVDKTV | |
| 238 | ASTTASSVFPLAPSCGTTSGATVALACLSLGYFPEPVTV | Wild-type feline IgG2 |
| | SWNSGALTSGVHTFPSVLQASGLYSLSSMVTVPSSRWLS | CH1 |
| | DTFTCNVAHRPSSTKVDKTV | |
| 239 | ASTTAPSVFPLAPSCGTTSGATVLLACLVDGYFPEPVTV | Variant feline IgG1 CH1 |
| | SWNSGALTSGVHTFPAVLQASGLYSLSSMVTVPSSRWLS | A(24)L |
| | DTFTCNVAHPPSNTKVDKTV | S(30)D |
| 240 | ASTTASSVFPLAPSCGTTSGATVLLACLDLGYFPEPVTV | Variant feline IgG2 CH1 |
| | SWNSGALTSGVHTFPSVLQASGLYSLSSMVTVPSSRWLS | A(24)L |
| | DTFTCNVAHRPSSTKVDKTV | S(29)D |
| 241 | RSDAQPSVFLFQPSLDELHTGSASIVCILNDFYPKEVNV | Wild-type feline |
| | KWKVDGVVQNKGIQESTTEQNSKDSTYSLSSTLTMSSTE | constant region |
| | YQSHEKFSCEVTHKSLASTLVKSFNRSECQRE | |
| 242 | RSDAQPSVFLAQPSLDELHTGRASIVCILNDFYPKEVNV | Variant feline κ constant |
| | KWKVDGVVQNKGIQESTTEQNSKDSTYSLSSTLIMSSTE | region |
| | YQSHEKFSCEVTHKSLASTLVKSFNRSECQRE | F(11)A |
| | | S(22)R |
| 243 | EVQLVQSGAEVKKPGASVKVSCKASGYTFTSYVMHWVRQ | Caninized Clone I |
| | APGQGLEWMGYINPNNDGTFYNGKFQGRVTLTADTSTST | variable HC v2 and |
| | AYMELSSLRAGDIAVYYCAAFYYGFAYWGQGTLVTVSSA | variant canine IgG-B Fc |
| | STTAPSVFPLAPSCGSTSGSTVLLACLVDGYFPEPVTVS | C1q− |
| | WNSGSLTSGVHTFPSVLQSSGLYSLSSMVTVPSSRWPSE | CD16− |
| | TFTCNVAHPASKTKVDKPVPKRENGRVPRPPDCPKCPAP | Bispecific Knob |
| | EPLGGPSVFIFPPKPKDTLLIARTPEVTCVVVDLDREDP | Variant CH1 |
| | EVQISWFVDGKQMQTAKTQPREEQFNGTYRVVSVLPIGH | |
| | QDWLKGKQFTCRVNNKALPSPIERTISKARGQAHQPSVY | |
| | VLPPSREELSKNTVTLWCLIKDFFPPDIDVEWQSNGQQE | |
| | PESKYRTTPPQLDEDGSYFLYSKLSVDKSRWQRGDTFIC | |
| | AVMHEALHNHYTQESLSHSPGK | |
| 244 | DIVMTQTPLSLSVSPGETASISCRASQEISGYLSWLQQK | Caninized Clone I |
| | PGGTIKRLIYAASNRDTGVPDRFSGSGSGTDFTLRISRV | variable LC v2 and |
| | EADDTGVYYCLQYASYPWTFGGGTKVELKRNDAQPAVYL | variant canine κ constant |
| | AQPSPDQLHTGRASVVCLLNSFYPKDINVKWKVDGVIQD | region |
| | TGIQESVTEQDKDSTYSLSSTLIMSSTEYLSHELYSCEI | |
| | THKSLPSTLIKSFQRSECQRVD | |
| 245 | EVQLVESGPSLVKPGGSLRLTCSVTGDSITSGYWNWIRK | Caninized anti-canine |
| | FPGNKLEYMGYISYSGITDYNPSLKSRITISRDTSKNQY | IL31 Clone M14 |
| | YLQLNSVTTEDTATYYCARYGNYGYAMDYWGQGTLVTVS | variable HC and variant |
| | SASTTAPSVFPLAPSCGSTSGSTVALACLVSGYFPEPVT | canine IgG-B Fc |
| | VSWNSGSLTSGVHTFPSVLQSSGLYSLSSMVTVPSSRWP | C1q− |
| | SETFTCNVAHPASKTKVDKPVPKRENGRVPRPPDCPKCP | CD16− |
| | APEPLGGPSVFIFPPKPKDTLLIARTPEVTCVVVDLDRE | Bispecific Hole |
| | DPEVQISWFVDGKQMQTAKTQPREEQFNGTYRVVSVLPI | |
| | GHQDWLKGKQFTCRVNNKALPSPIERTISKARGQAHQPS | |
| | VYVLPPSREELSKNTVTLSCAIKDFFPPDIDVEWQSNGQ | |
| | QEPESKYRTTPPQLDEDGSYFLYSKLSVDKSRWQRGDTF | |
| | ICAVMHEALHNHYTQESLSHSPGK | |
| 246 | DIVMTQSPASLSVSLGQRATISCRASESVDTYGNSFMHW | Caninized anti-canine |
| | YQQKPGQSPKLLIYRASNLESGIPARFGGSGSGTDFTLT | IL31 Clone M14 |
| | IDPVQADDVATYYCQQSYEDPWTFGGGTKLEIKRNDAQP | variable LC and canine κ |
| | AVYLFQPSPDQLHTGSASVVCLLNSFYPKDINVKWKVDG | constant region |
| | VIQDTGIQESVTEQDKDSTYSLSSTLTMSSTEYLSHELY | |
| | SCEITHKSLPSTLIKSFQRSECQRVD | |
| 247 | GPSVFIFPPNPKDTLMITRTPEVTCVVVDVSQENPDVKF | Exemplary wild-type |
| | NWYMDGVEVRTATTRPKEEQFNSTYRVVSVLRIQHQDWL | equine IgG1 Fc |
| | SGKEFKCKVNNQALPQPIERTITKTKGRSQEPQVYVLAP | |
| | HPDELSKSKVSVTCLVKDFYPPEINIEWQSNGQPELETK | |
| | YSTTQAQQDSDGSYFLYSKLSVDRNRWQQGTTFTCGVMH | |
| | EALHNHYTQKNVSKNPGK | |
| 248 | GPSVFIFPPNPKDALMISRTPVVTCVVVNLSDQYPDVQF | Exemplary wild-type |
| | SWYVDNTEVHSAITKQREAQFNSTYRVVSVLPIQHQDWL | equine IgG2 Fc |
| | SGKEFKCSVTNVGVPQPISRAISRGKGPSRVPQVYVLPP | |
| | HPDELAKSKVSVTCLVKDFYPPDISVEWQSNRWPELEGK | |
| | YSTTPAQLDGDGSYFLYSKLSLETSRWQQVESFTCAVMH | |
| | EALHNHFTKTDISESLGK | |
| 249 | GPSVFIFPPKPKDVLMITRMPEVTCLVVDVSHDSSDVLF | Exemplary wild-type |
| | TWYVDGTEVKTAKTMPNEEQNNSTYRVVSVLRIQHQDWL | equine IgG3 Fc |
| | NGKKFKCKVNNQALPAPVERTISKATGQTRVPQVYVLAP | |
| | HPDELSKNKVSVTCLVKDFYPPDITVEWQSNEHPEPEGK | |
| | YRTTEAQKDSDGSYFLYSKLTVEKDRWQQGTTFTCVVMH | |
| | EALHNHVMQKNISKNPGK | |
| 250 | GPSVFIFPPKPKDVLMISRTPTVTCVVVDVGHDFPDVQF | Exemplary wild-type |
| | NWYVDGVETHTATTEPKQEQFNSTYRVVSVLPIQHKDWL | equine IgG4 Fc |
| | SGKEFKCKVNNKALPAPVERTISAPTGQPREPQVYVLAP | |
| | HRDELSKNKVSVTCLVKDFYPPDIDIEWKSNGQPEPETK | |
| | YSTTPAQLDSDGSYFLYSKLTVETNRWQQGTTFTCAVMH | |
| | EALHNHYTEKSVSKSPGK | |
| 251 | GPSVFIFPPKPKDVLMISRKPEVTCVVVDLGHDDPDVQF | Exemplary wild-type |
| | TWFVDGVETHTATTEPKEEQFNSTYRVVSVLPIQHQDWL | equine IgG5 Fc |
| | SGKEFKCSVTSKALPAPVERTISKAKGQLRVPQVYVLAP | |
| | HPDELAKNTVSVTCLVKDFYPPEIDVEWQSNEHPEPEGK | |
| | YSTTPAQLNSDGSYFLYSKLSVETSRWKQGESFTCGVMH | |
| | EAVENHYTQKNVSHSPGK | |
| 252 | GRPSVFIFPPNPKDTLMISRTPEVTCVVVDVSQENPDV | Exemplary wild-type |
| | KFNWYVDGVEAHTATTKAKEKQDNSTYRVVSVLPIQHQ | equine IgG6 Fc |
| | DWRRGKEFKCKVNNRALPAPVERTITKAKGELQDPKVY | |
| | ILAPHREEVTKNTVSVTCLVKDFYPPDINVEWQSNEEP | |
| | EPEVKYSTTPAQLDGDGSYFLYSKLTVETDRWEQGESF | |
| | TCVVMHEAIRHTYRQKSITNFPGK | |
| 253 | GPSVFIFPPKPKDVLMISRTPTVTCVVVDVGHDFPDVQF | Exemplary wild-type |
| | NWYVDGVETHTATTEPKQEQNNSTYRVVSILAIQHKDWL | equine IgG7 Fc |
| | SGKEFKCKVNNQALPAPVQKTISKPTGQPREPQVYVLAP | |
| | HPDELSKNKVSVTCLVKDFYPPDIDIEWKSNGQPEPETK | |
| | YSTTPAQLDGDGSYFLYSKLTVETNRWQQGTTFTCAVMH | |
| | EALHNHYTEKSVSKSPGK | |
| 254 | GPSVFIFPPNPKDTLMITRTPEVTCVVVDVSQENPDVKF | Exemplary variant |
| | NWYMDGVEVRTATTRPKEEQFNSTYRVVSVLRIQHQDWL | equine IgG1 Fc |
| | SGKEFKCKVNNQALPQPIERTITKTKGRSQEPQVYVLAP | Bispecific knob |
| | HPDELSKSKVSVWCLVKDFYPPEINIEWQSNGQPELETK | T(130)W |
| | YSTTQAQQDSDGSYFLYSKLSVDRNRWQQGTTFTCGVMH | |
| | EALHNHYTQKNVSKNPGK | |
| 255 | GPSVFIFPPNPKDALMISRTPVVTCVVVNLSDQYPDVQF | Exemplary variant |
| | SWYVDNTEVHSAITKQREAQFNSTYRVVSVLPIQHQDWL | equine IgG2 Fc |
| | SGKEFKCSVTNVGVPQPISRAISRGKGPSRVPQVYVLPP | Bispecific knob |
| | HPDELAKSKVSVWCLVKDFYPPDISVEWQSNRWPELEGK | T(130)W |
| | YSTTPAQLDGDGSYFLYSKLSLETSRWQQVESFTCAVMH | |
| | EALHNHFTKTDISESLGK | |
| 256 | GPSVFIFPPKPKDVLMITRMPEVTCLVVDVSHDSSDVLF | Exemplary variant |
| | TWYVDGTEVKTAKTMPNEEQNNSTYRVVSVLRIQHQDWL | equine IgG3 Fc |
| | NGKKFKCKVNNQALPAPVERTISKATGQTRVPQVYVLAP | Bispecific knob |
| | HPDELSKNKVSVWCLVKDFYPPDITVEWQSNEHPEPEGK | T(130)W |
| | YRTTEAQKDSDGSYFLYSKLTVEKDRWQQGTTFTCVVMH | |
| | EALHNHVMQKNISKNPGK | |
| 257 | GPSVFIFPPKPKDVLMISRTPTVTCVVVDVGHDFPDVQF | Exemplary variant |
| | NWYVDGVETHTATTEPKQEQFNSTYRVVSVLPIQHKDWL | equine IgG4 Fc |
| | SGKEFKCKVNNKALPAPVERTISAPTGQPREPQVYVLAP | Bispecific knob |
| | HRDELSKNKVSVWCLVKDFYPPDIDIEWKSNGQPEPETK | T(130)W |
| | YSTTPAQLDSDGSYFLYSKLTVETNRWQQGTTFTCAVMH | |
| | EALHNHYTEKSVSKSPGK | |
| 258 | GPSVFIFPPKPKDVLMISRKPEVTCVVVDLGHDDPDVQF | Exemplary variant |
| | TWFVDGVETHTATTEPKEEQFNSTYRVVSVLPIQHQDWL | equine IgG5 Fc |
| | SGKEFKCSVTSKALPAPVERTISKAKGQLRVPQVYVLAP | Bispecific knob |
| | HPDELAKNTVSVWCLVKDFYPPEIDVEWQSNEHPEPEGK | T(130)W |
| | YSTTPAQLNSDGSYFLYSKLSVETSRWKQGESFTCGVMH | |
| | EAVENHYTQKNVSHSPGK | |
| 259 | RPSVFIFPPNPKDTLMISRTPEVTCVVVDVSQENPDVK | Exemplary variant |
| | FNWYVDGVEAHTATTKAKEKQDNSTYRVVSVLPIQHQD | equine IgG6 Fc |
| | WRRGKEFKCKVNNRALPAPVERTITKAKGELQDPKVYI | Bispecific knob |
| | LAPHREEVTKNTVSVWCLVKDFYPPDINVEWQSNEEPE | T(130)W |
| | PEVKYSTTPAQLDGDGSYFLYSKLIVETDRWEQGESFT | |
| | CVVMHEAIRHTYRQKSITNFPGK | |
| 260 | GPSVFIFPPKPKDVLMISRTPTVTCVVVDVGHDFPDVQF | Exemplary variant |
| | NWYVDGVETHTATTEPKQEQNNSTYRVVSILAIQHKDWL | equine IgG7 Fc |
| | SGKEFKCKVNNQALPAPVQKTISKPTGQPREPQVYVLAP | Bispecific knob |
| | HPDELSKNKVSVWCLVKDFYPPDIDIEWKSNGQPEPETK | T(130)W |
| | YSTTPAQLDGDGSYFLYSKLTVETNRWQQGTTFTCAVMH | |
| | EALHNHYTEKSVSKSPGK | |
| 261 | GPSVFIFPPNPKDTLMITRTPEVTCVVVDVSQENPDVKF | Exemplary variant |
| | NWYMDGVEVRTATTRPKEEQFNSTYRVVSVLRIQHQDWL | equine IgG1 Fc |
| | SGKEFKCKVNNQALPQPIERTITKTKGRSQEPQVYVLAP | Bispecific hole |
| | HPDELSKSKVSVSCAVKDFYPPEINIEWQSNGQPELETK | T(130)S |
| | YSTTQAQQDSDGSYFLYSKLSVDRNRWQQGTTFTCGVMH | L(132)A |
| | EALHNHYTQKNVSKNPGK | |
| 262 | GPSVFIFPPNPKDALMISRTPVVTCVVVNLSDQYPDVQF | Exemplary variant |
| | SWYVDNTEVHSAITKQREAQFNSTYRVVSVLPIQHQDWL | equine IgG2 Fc |
| | SGKEFKCSVTNVGVPQPISRAISRGKGPSRVPQVYVLPP | Bispecific hole |
| | HPDELAKSKVSVSCAVKDFYPPDISVEWQSNRWPELEGK | T(130)S |
| | YSTTPAQLDGDGSYFLYSKLSLETSRWQQVESFTCAVMH | L(132)A |
| | EALHNHFTKTDISESLGK | |
| 263 | GPSVFIFPPKPKDVLMITRMPEVTCLVVDVSHDSSDVLF | Exemplary variant |
| | TWYVDGTEVKTAKTMPNEEQNNSTYRVVSVLRIQHQDWL | equine IgG3 Fc |
| | NGKKFKCKVNNQALPAPVERTISKATGQTRVPQVYVLAP | Bispecific hole |
| | HPDELSKNKVSVSCAVKDFYPPDITVEWQSNEHPEPEGK | T(130)S |
| | YRTTEAQKDSDGSYFLYSKLTVEKDRWQQGTTFTCVVMH | L(132)A |
| | EALHNHVMQKNISKNPGK | |
| 264 | GPSVFIFPPKPKDVLMISRTPTVTCVVVDVGHDFPDVQF | Exemplary variant |
| | NWYVDGVETHTATTEPKQEQFNSTYRVVSVLPIQHKDWL | equine IgG4 Fc |
| | SGKEFKCKVNNKALPAPVERTISAPTGQPREPQVYVLAP | Bispecific hole |
| | HRDELSKNKVSVSCAVKDFYPPDIDIEWKSNGQPEPETK | T(130)S |
| | YSTTPAQLDSDGSYFLYSKLTVETNRWQQGTTFTCAVMH | L(132)A |
| | EALHNHYTEKSVSKSPGK | |
| 265 | GPSVFIFPPKPKDVLMISRKPEVTCVVVDLGHDDPDVQF | Exemplary variant |
| | TWFVDGVETHTATTEPKEEQFNSTYRVVSVLPIQHQDWL | equine IgG5 Fc |
| | SGKEFKCSVTSKALPAPVERTISKAKGQLRVPQVYVLAP | Bispecific hole |
| | HPDELAKNTVSVSCAVKDFYPPEIDVEWQSNEHPEPEGK | T(130)S |
| | YSTTPAQLNSDGSYFLYSKLSVETSRWKQGESFTCGVMH | L(132)A |
| | EAVENHYTQKNVSHSPGK | |
| 266 | RPSVFIFPPNPKDTLMISRTPEVTCVVVDVSQENPDVK | Exemplary variant |
| | FNWYVDGVEAHTATTKAKEKQDNSTYRVVSVLPIQHQD | equine IgG6 Fc |
| | WRRGKEFKCKVNNRALPAPVERTITKAKGELQDPKVYI | Bispecific hole |
| | LAPHREEVTKNTVSVSCAVKDFYPPDINVEWQSNEEPE | T(130)S |
| | PEVKYSTTPAQLDGDGSYFLYSKLTVETDRWEQGESFT | L(132)A |
| | CVVMHEAIRHTYRQKSITNFPGK | |
| 267 | GPSVFIFPPKPKDVLMISRTPTVTCVVVDVGHDFPDVQF | Exemplary variant |
| | NWYVDGVETHTATTEPKQEQNNSTYRVVSILAIQHKDWL | equine IgG7 Fc |
| | SGKEFKCKVNNQALPAPVQKTISKPTGQPREPQVYVLAP | Bispecific hole |
| | HPDELSKNKVSVSCAVKDFYPPDIDIEWKSNGQPEPETK | T(130)S |
| | YSTTPAQLDGDGSYFLYSKLTVETNRWQQGTTFTCAVMH | L(132)A |
| | EALHNHYTEKSVSKSPGK | |
| 278 | TVSGFSLSRYSVH | Clone M3 CDR-H1 |
| 279 | GMIWGGGST | Clone M3 CDR-H2 |
| 280 | TYRGYALDY | Clone M3 CDR-H3 |
| 281 | QVQLKESGPGLVAPSQSLSITC | Clone M3 HC-FR1 |
| 282 | WVRQPPGKGLEWL | Clone M3 HC-FR2 |
| 283 | DYNSVFKSRLSISKDNSKSQVFLKMNSLQTDDTAMYYCA | Clone M3 HC-FR3 |
| | R | |
| 284 | WGQGTSVTVSS | Clone M3 HC-FR4 |
| 285 | RASQDISNYLN | Clone M3 CDR-L1 |
| 286 | YYTSRLQS | Clone M3 CDR-L2 |
| 287 | QQANTLPLT | Clone M3 CDR-L3 |
| 288 | DIQMTQTTSSLSASLGDRVTISC | Clone M3 LC-FR1 |
| 289 | WYQQKPDGTVKLLI | Clone M3 LC-FR2 |
| 290 | GVPSRFSGSGSGTDYCLTISNLEQEDIATYFC | Clone M3 LC-FR3 |
| 291 | FGSGTKLELK | Clone M3 LC-FR4 |
| 292 | QVQLKESGPGLVAPSQSLSITCTVSGFSLSRYSVHWVRQ | Clone M3 variable HC |
| | PPGKGLEWLGMIWGGGSTDYNSVFKSRLSISKDNSKSQV | |
| | FLKMNSLQTDDTAMYYCARTYRGYALDYWGQGTSVTVSS | |
| 293 | DIQMTQTTSSLSASLGDRVTISCRASQDISNYLNWYQQK | Clone M3 variable LC |
| | PDGTVKLLIYYTSRLQSGVPSRFSGSGSGTDYCLTISNL | |
| | EQEDIATYFCQQANTLPLTFGSGTKLELK | |
| 294 | TVSGFSLSRYSVH | Clone M5 CDR-H1 |
| 295 | GMIWGGGST | Clone M5 CDR-H2 |
| 296 | TYRGYALDY | Clone M5 CDR-H3 |
| 297 | QVQLKESGPGLVAPSQSLSITC | Clone M5 HC-FR1 |
| 298 | WVRQPPGKGLEWL | Clone M5 HC-FR2 |
| 299 | DYNSVFKSRLSISKDNSKSQVFLKMNSLQTDDTAMYYCA | Clone M5 HC-FR3 |
| | R | |
| 300 | WGQGTSVTVSS | Clone M5 HC-FR4 |
| 301 | RASQDISNYLN | Clone M5 CDR-L1 |
| 302 | YYTSRLQS | Clone M5 CDR-L2 |
| 303 | QQANTLPLT | Clone M5 CDR-L3 |
| 304 | DIQMTQTTSSLSASLGDRVTISC | Clone M5 LC-FR1 |
| 305 | WYQQKPDGTVKLLI | Clone M5 LC-FR2 |
| 306 | GVPSRFSGSGSGTDYCLTISNLEQEDIATYFC | Clone M5 LC-FR3 |
| 307 | FGSGTKLELK | Clone M5 LC-FR4 |
| 308 | QVQLKESGPGLVAPSQSLSITCTVSGFSLSRYSVHWVRQ | Clone M5 variable HC |
| | PPGKGLEWLGMIWGGGSTDYNSVFKSRLSISKDNSKSQV | |
| | FLKMNSLQTDDTAMYYCARTYRGYALDYWGQGTSVTVSS | |
| 309 | DIQMTQTTSSLSASLGDRVTISCRASQDISNYLNWYQQK | Clone M5 variable LC |
| | PDGTVKLLIYYTSRLQSGVPSRFSGSGSGTDYCLTISNL | |
| | EQEDIATYFCQQANTLPLTFGSGTKLELK | |
| 310 | KASGYTFTSYDIN | Clone M8 CDR-H1 |
| 311 | GWIYPGDGSTK | Clone M8 CDR-H2 |
| 312 | SSFVV | Clone M8 CDR-H3 |
| 313 | QVQLQQSGPELVKPGALVKISC | Clone M8 HC-FR1 |
| 314 | WVKQRPGQGLEWI | Clone M8 HC-FR2 |
| 315 | YNEKFKGKATLTADKSSSTAYMQLSSLTSEDSAVYFCAR | Clone M8 HC-FR3 |
| 316 | WGAGTTVTVSS | Clone M8 HC-FR4 |
| 317 | KASDPINNWLA | Clone M8 CDR-L1 |
| 318 | SGATSLET | Clone M8 CDR-L2 |
| 319 | HQYWSIPYT | Clone M8 CDR-L3 |
| 320 | DIQMTQSSSYLSVSLGGRVTITC | Clone M8 LC-FR1 |
| 321 | WYQQKPGNAPRLLI | Clone M8 LC-FR2 |
| 322 | GVPSRISGSGSGKDYSLSITSLQTEDIATYYC | Clone M8 LC-FR3 |
| 323 | FGGGTKLEIK | Clone M8 LC-FR4 |
| 324 | QVQLQQSGPELVKPGALVKISCKASGYTFTSYDINWVKQ | Clone M8 variable HC |
| | RPGQGLEWIGWIYPGDGSTKYNEKFKGKATLTADKSSST | |
| | AYMQLSSLTSEDSAVYFCARSSFVVWGAGTTVTVSS | |
| 325 | DIQMTQSSSYLSVSLGGRVTITCKASDPINNWLAWYQQK | Clone M8 variable LC |
| | PGNAPRLLISGATSLETGVPSRISGSGSGKDYSLSITSL | |
| | QTEDIATYYCHQYWSIPYTFGGGTKLEIK | |
| 326 | AASGFTFSSFGMH | Clone M9 CDR-H1 |
| 407 | ASGFTFSSFGMH | Alternative M9 CDR-H1 |
| 327 | AYIRSDSSTIY | Clone M9 CDR-H2 |
| 328 | SGYYGSFSLTY | Clone M9 CDR-H3 |
| 329 | DVQLVESGGGLVQPGGSRKLSC | Clone M9 HC-FR1 |
| 330 | WVRQAPEKGLEWV | Clone M9 HC-FR2 |
| 331 | YADTVKGRFTISRDNPKNTLFLQMTSLRSEDTAMYYCAR | Clone M9 HC-FR3 |
| 332 | WGQGTLVTVSA | Clone M9 HC-FR4 |
| 333 | SASSSVSSNYLH | Clone M9 CDR-L1 |
| 334 | YRTSNLPS | Clone M9 CDR-L2 |
| 335 | QQGSGMLT | Clone M9 CDR-L3 |
| 336 | EIVLTQSPTTMAASPGEKITITC | Clone M9 LC-FR1 |
| 337 | WYQQKPGFSPKLLI | Clone M9 LC-FR2 |
| 338 | GVPARFFGSGSGTSYSLTIGTMEAEDVATYYC | Clone M9 LC-FR3 |
| 339 | FGAGTKLELK | Clone M9 LC-FR4 |
| 340 | DVQLVESGGGLVQPGGSRKLSCAASGFTFSSFGMHWVRQ | Clone M9 variable HC |
| | APEKGLEWVAYIRSDSSTIYYADTVKGRFTISRDNPKNT | |
| | LFLQMTSLRSEDTAMYYCARSGYYGSFSLTYWGQGTLVT | |
| | VSA | |
| 341 | EIVLTQSPTTMAASPGEKITITCSASSSVSSNYLHWYQQ | Clone M9 variable LC |
| | KPGFSPKLLIYRTSNLPSGVPARFFGSGSGTSYSLTIGT | |
| | MEAEDVATYYCQQGSGMLTFGAGTKLELK | |
| 342 | EVQLVESGGDLVKPAGSLRLSCTVSGFSLSRYSVHWVRQ | Caninized Clone M3 |
| | APGKGLEWLGMIWGGGSTDYNSVVKGRFTISRDNAKNTV | variable HC v1 |
| | YLQMNSLRAEDTAMYYCARTYRGYALDYWGQGTLVTVSS | |
| 343 | ELTLQESGPGLVKPSQTLSLTCTVSGFSLSRYSVHWIRQ | Caninized Clone M3 |
| | PRGRGLELLGMIWGGGSTDYNPAFQGRISITADTAKNQF | variable HC v2 |
| | SLQLSSMTTEDTAVYYCARTYRGYALDYWGQGTLVTVSS | |
| 344 | DIVMTQTPLSLSVSPGEPASISCRASQDISNYLNWYLQK | Caninized Clone M3 |
| | AGQSPRLLIYYTSRLQSGVPDRFSGSGSGTDFTLRIGRV | variable LC v1 |
| | EAEDAGIYFCQQANTLPLTFGQGTRLEVR | |
| 345 | EVQLVESGGDLVKPGGSLRLSCAASGFTFSSFGMHWVRQ | Caninized Clone M9 |
| | APGKGLEWVAYIRSDSSTIYYADAVKGRFTISRDNAKNT | variable HC v1 |
| | LYLQMNSLRAEDTAMYYCARSGYYGSFSLTYWGQGTLVT | |
| | VSS | |
| 346 | EVQLVESGGDLVKPGGSLRLSCVASGFTFSSFGMHWVRQ | Caninized Clone M9 |
| | APGKGLQWVAYIRSDSSTIYYADAVKGRFTISRDNAKNT | variable HC v2 |
| | LYLQMNSLRAEDTAMYYCARSGYYGSFSLTYWGQGTLVT | |
| | VSS | |
| 347 | DIMLTQTPLSLSVSPGEPASISCSASSSVSSNYLHWYLQ | Caninized Clone M9 |
| | KAGQSPRLLIYRTSNLPSGVPDRFSGSGSGTDFTLRIGR | variable LC v1 |
| | VEAEDAGIYYCQQGSGMLTFGQGTRLEVR | |
| 408 | DIVMTQTPLSLSVSPGEPASISCSASSSVSSNYLHWYLQ | Caninized Clone M9 |
| | KAGQSPRLLIYRTSNLPSGVPDRFSGSGSGTDFTLRISR | variable LC v2 |
| | VEAEDAGIYYCQQGSGMLTFGQGTKLEIK | |
| 348 | EVQLVESGGDLVKPAGSLRLSCTVSGFSLSRYSVHWVRQ | Caninized Clone M3 |
| | APGKGLEWLGMIWGGGSTDYNSVVKGRFTISRDNAKNTV | variable HC v1 and |
| | YLQMNSLRAEDTAMYYCARTYRGYALDYWGQGTLVTVSS | variant canine IgG-B |
| | ASTTAPSVFPLAPSCGSTSGSTVALACLVSGYFPEPVTV | Clq−, CD16− |
| | SWNSGSLTSGVHTFPSVLQSSGLYSLSSMVTVPSSRWPS | |
| | ETFTCNVAHPASKTKVDKPVPKRENGRVPRPPDCPKCPA | |
| | PEPLGGPSVFIFPPKPKDTLLIARTPEVTCVVVDLDRED | |
| | PEVQISWFVDGKQMQTAKTQPREEQFNGTYRVVSVLPIG | |
| | HQDWLKGKQFTCRVNNKALPSPIERTISKARGQAHQPSV | |
| | YVLPPSREELSKNTVSLTCLIKDFFPPDIDVEWQSNGQQ | |
| | EPESKYRTTPPQLDEDGSYFLYSKLSVDKSRWQRGDTFI | |
| | CAVMHEALHNHYTQESLSHSPGK | |
| 349 | ELTLQESGPGLVKPSQTLSLTCTVSGFSLSRYSVHWIRQ | Caninized Clone M3 |
| | PRGRGLELLGMIWGGGSTDYNPAFQGRISITADTAKNQF | variable HC v2 and |
| | SLQLSSMTTEDTAVYYCARTYRGYALDYWGQGTLVTVSS | variant canine IgG-B |
| | ASTTAPSVFPLAPSCGSTSGSTVALACLVSGYFPEPVTV | C1q−, CD16− |
| | SWNSGSLTSGVHTFPSVLQSSGLYSLSSMVTVPSSRWPS | |
| | ETFTCNVAHPASKTKVDKPVPKRENGRVPRPPDCPKCPA | |
| | PEPLGGPSVFIFPPKPKDTLLIARTPEVTCVVVDLDRED | |
| | PEVQISWFVDGKQMQTAKTQPREEQFNGTYRVVSVLPIG | |
| | HQDWLKGKQFTCRVNNKALPSPIERTISKARGQAHQPSV | |
| | YVLPPSREELSKNTVSLTCLIKDFFPPDIDVEWQSNGQQ | |
| | EPESKYRTTPPQLDEDGSYFLYSKLSVDKSRWQRGDTFI | |
| | CAVMHEALHNHYTQESLSHSPGK | |
| 350 | DIVMTQTPLSLSVSPGEPASISCRASQDISNYLNWYLQK | Caninized Clone M3 |
| | AGQSPRLLIYYTSRLQSGVPDRFSGSGSGTDFTLRIGRV | variable LC v1 and |
| | EAEDAGIYFCQQANTLPLTFGQGTRLEVRRNDAQPAVYL | canine κ light constant |
| | FQPSPDQLHTGSASVVCLLNSFYPKDINVKWKVDGVIQD | region |
| | TGIQESVTEQDKDSTYSLSSTLTMSSTEYLSHELYSCEI | |
| | THKSLPSTLIKSFQRSECQRVD | |
| 351 | EVQLVESGGDLVKPGGSLRLSCAASGFTFSSFGMHWVRQ | Caninized Clone M9 |
| | APGKGLEWVAYIRSDSSTIYYADAVKGRFTISRDNAKNT | variable HC v1 and |
| | LYLQMNSLRAEDTAMYYCARSGYYGSFSLTYWGQGTLVT | variant canine IgG-B |
| | VSSASTTAPSVFPLAPSCGSTSGSTVALACLVSGYFPEP | C1q−, CD16− |
| | VTVSWNSGSLTSGVHTFPSVLQSSGLYSLSSMVTVPSSR | |
| | WPSETFTCNVAHPASKTKVDKPVPKRENGRVPRPPDCPK | |
| | CPAPEPLGGPSVFIFPPKPKDTLLIARTPEVTCVVVDLD | |
| | REDPEVQISWFVDGKQMQTAKTQPREEQFNGTYRVVSVL | |
| | PIGHQDWLKGKQFTCRVNNKALPSPIERTISKARGQAHQ | |
| | PSVYVLPPSREELSKNTVSLTCLIKDFFPPDIDVEWQSN | |
| | GQQEPESKYRTTPPQLDEDGSYFLYSKLSVDKSRWQRGD | |
| | TFICAVMHEALHNHYTQESLSHSPGK | |
| 352 | EVQLVESGGDLVKPGGSLRLSCVASGFTFSSFGMHWVRQ | Caninized Clone M9 |
| | APGKGLQWVAYIRSDSSTIYYADAVKGRFTISRDNAKNT | variable HC v2 and |
| | LYLQMNSLRAEDTAMYYCARSGYYGSFSLTYWGQGTLVT | variant canine IgG-B |
| | VSSASTTAPSVFPLAPSCGSTSGSTVALACLVSGYFPEP | Clq−, CD16− |
| | VTVSWNSGSLTSGVHTFPSVLQSSGLYSLSSMVTVPSSR | |
| | WPSETFTCNVAHPASKTKVDKPVPKRENGRVPRPPDCPK | |
| | CPAPEPLGGPSVFIFPPKPKDTLLIARTPEVTCVVVDLD | |
| | REDPEVQISWFVDGKQMQTAKTQPREEQFNGTYRVVSVL | |
| | PIGHQDWLKGKQFTCRVNNKALPSPIERTISKARGQAHQ | |
| | PSVYVLPPSREELSKNTVSLTCLIKDFFPPDIDVEWQSN | |
| | GQQEPESKYRTTPPQLDEDGSYFLYSKLSVDKSRWQRGD | |
| | TFICAVMHEALHNHYTQESLSHSPGK | |
| 353 | DIMLTQTPLSLSVSPGEPASISCSASSSVSSNYLHWYLQ | Caninized Clone M9 |
| | KAGQSPRLLIYRTSNLPSGVPDRFSGSGSGTDFTLRIGR | variable LC v1 and |
| | VEAEDAGIYYCQQGSGMLTFGQGTRLEVRRNDAQPAVYL | canine κ light constant |
| | FQPSPDQLHTGSASVVCLLNSFYPKDINVKWKVDGVIQD | region |
| | TGIQESVTEQDKDSTYSLSSTLTMSSTEYLSHELYSCEI | |
| | THKSLPSTLIKSFQRSECQRVD | |
| 409 | DIVMTQTPLSLSVSPGEPASISCSASSSVSSNYLHWYLQ | Caninized Clone M9 |
| | KAGQSPRLLIYRTSNLPSGVPDRFSGSGSGTDFTLRISR | variable LC v2 and |
| | VEAEDAGIYYCQQGSGMLTFGQGTKLEIKRNDAQPAVYL | canine κ light constant |
| | FQPSPDQLHTGSASVVCLLNSFYPKDINVKWKVDGVIQD | region |
| | TGIQESVTEQDKDSTYSLSSTLTMSSTEYLSHELYSCEI | |
| | THKSLPSTLIKSFQRSECQRVD | |
| 354 | DFMGSENHTCVPEN | M3 canine IL4R epitope |
| 355 | GSVKVLHEPSCFSDYISTSVCQWKMDHPTNCSA | M8 canine IL4R |
| | | epitope 1 |
| 356 | REDSVCVCSMPI | M8 canine ILAR |
| | | epitope 2 |
| 357 | REDSVCVCSMPIDDAVEADV | M9 canine IL4R epitope |
| 379 | MGVPRPRSWGLGFLLFLLPTLRAADSHLSLLYHLTAVSAPPPG | Exemplary canine FcRn |
| | TPAFWASGWLGPQQYLSYNNLRAQAEPYGAWVWENQVSWYWEK | with poly-His |
| | ETTDLRTKEGLFLEALKALGDGGPYTLQGLLGCELGPDNTSVP | |
| | VAKFALNGEDFMTFDPKLGTWNGDWPETETVSKRWMQQAGAVS | |
| | KERTFLLYSCPQRLLGHLERGRGNLEWKEPPSMRLKARPGSPG | |
| | FSVLTCSAFSFYPPELQLRFLRNGLAAGSGEGDFGPNGDGSFH | |
| | AWSSLTVKSGDEHHYRCLVQHAGLPQPLTVELESPAKSSGSHH | |
| | HHHH | |
| 380 | MAPRPALATAGFLALLLILLAACRLDAVQHPPKIQVYSRHPAE | Exemplary canine B2M |
| | NGKPNFLNCYVSGFHPPEIEIDLLKNGKEMKAEQTDLSFSKDW | |
| | TFYLLVHTEFTPNEQDEFSCRVKHVTLSEPQIVKWDRDN | |
| 381 | PAPEMLGGPSVFIFPPKPKDTLFIARTPEVTCVVVDLDP | Exemplary variant |
| | EDPEVQISWFVDGKQMQTAKTQPREEQFNGTYRVVSVLP | canine IgG-B Fc |
| | IGHQDWLKGKQFTCKVNNKALPSPIERTISKARGQAHQP | Protein A+ |
| | SVYVLPPSREELSKNTVSLTCLIKDFFPPDIDVEWQSNG | C1q+ |
| | QQEPESKYRTTPPQLDEDGSYFLYSKLSVDKSRWQRGDT | CD16+ |
| | FICAVMHEALHNHYTQESLSHSPGK | L(23)F(F00) |
| 382 | PAPEMLGGPSVFIFPPKPKDTLYIARTPEVTCVVVDLDP | Exemplary variant |
| | EDPEVQISWFVDGKQMQTAKTQPREEQFNGTYRVVSVLP | canine IgG-B Fc |
| | IGHQDWLKGKQFTCKVNNKALPSPIERTISKARGQAHQP | Protein A+ |
| | SVYVLPPSREELSKNTVSLTCLIKDFFPPDIDVEWQSNG | C1q+ |
| | QQEPESKYRTTPPQLDEDGSYFLYSKLSVDKSRWQRGDT | CD16+ |
| | FICAVMHEALHNHYTQESLSHSPGK | L(23)Y (Y00) |
| 383 | PVPEPLGGPSVLIFPPKPKDTLFIARTPEVTCVVLDLGR | Exemplary variant |
| | EDPEVQISWFVDGKEVHTAKTQSREQQFNGTYRVVSVLP | canine IgG-A Fc (F00; |
| | IGHQDWLTGKEFKCRVNHIDLPSPIERTISKARGRAHKP | Protein A+; Clq−; |
| | SVYVLPPSPKELSSSDTVSITCLIKDFYPPDIDVEWQSN | CD16−) |
| | GQQEPERKHRMTPPQLDEDGSYFLYSKLSVDKSRWQQGD | I(21)T; R(23)F; T(25)A; |
| | PFTCAVMHEALHNHYTDLSLSHSPGK | E(80)G; T(205)A; |
| | | Q(207)H |
| 384 | PAPEMLGGPSVLIFPPKPKDTLLIARTPEVTCVVVDLDP | Exemplary variant |
| | EDPEVQISWFVDGKEVHTAKTQSREEQFNGTYRVVSVLP | canine IgG-A Fc |
| | IGHQDWLTGKEFKCKVNNKALPSPIERTISKARGRAHKP | (Protein A+; C1q+; |
| | SVYVLPPSPKELSSSDTVSITCLIKDFYPPDIDVEWQSN | CD16+) |
| | GQQEPERKHRMTPPQLDEDGSYFLYSKLSVDKSRWQQGD | V2A; P5M; I21T; R23L; |
| | PFTCAVMHEALHNHYTDLSLSHSPGK | T25A; L35V; G38D; |
| | | R39P; Q65E; E80G; |
| | | R93K; H96N; 197K; |
| | | D98A; T205A; Q207H |
| 385 | PVPESLGGPSVFIFPPKPKDTLFIARTPEITCVVLDLGR | Exemplary variant |
| | EDPEVQISWFVDGKEVHTAKTQPREQQFNSTYRVVSVLP | canine IgG-D Fc (F00; |
| | IGHQDWLTGKEFKCRVNHIGLPSPIERTISKARGQAHQP | Protein A+; Clq−; |
| | SVYVLPPSPKELSSSDTVTLTCLIKDFFPPEIDVEWQSN | CD16−) |
| | GQPEPESKYHTTAPQLDEDGSYFLYSKLSVDKSRWQQGD | I(21)T; R(23)F; T(25)A; |
| | TFTCAVMHEALHNHYTDLSLSHSPGK | E(80)G; Q(205)A; |
| | | Q(207)H |
| 386 | PAPEMLGGPSVFIFPPKPKDTLLIARTPEITCVVVDLDP | Exemplary variant |
| | EDPEVQISWFVDGKEVHTAKTQPREEQFNSTYRVVSVLP | canine IgG-D Fc |
| | IGHQDWLTGKEFKCKVNNKALPSPIERTISKARGQAHQP | (Protein A+; C1q+; |
| | SVYVLPPSPKELSSSDTVTLTCLIKDFFPPEIDVEWQSN | CD16+) |
| | GQPEPESKYHTTAPQLDEDGSYFLYSKLSVDKSRWQQGD | V2A; S5M; I21T; R23L; |
| | TFTCAVMHEALHNHYTDLSLSHSPGK | T25A; L35V; G38D; |
| | | R39P; Q65E; E80G; |
| | | R93K; H96N; 197K; |
| | | G98A; Q207H |
| 387 | PAPEMLGGPSVFIFPPKPKDTLLIARTPEVTCVVVDLDP | Exemplary variant |
| | EDPEVQISWFVDGKQMQTAKTQPREEQFNGTYRVVSVLP | canine IgG-B Fc (OY0) |
| | IGHYDWLKGKQFTCKVNNKALPSPIERTISKARGQAHQP | Protein A+ |
| | SVYVLPPSREELSKNTVSLTCLIKDFFPPDIDVEWQSNG | C1q+ |
| | QQEPESKYRTTPPQLDEDGSYFLYSKLSVDKSRWQRGDT | CD16+ |
| | FICAVMHEALHNHYTQESLSHSPGK | Q(82)Y (OYO) |
| 388 | PAPEMLGGPSVFIFPPKPKDTLLIARTPEVTCVVVDLDP | Exemplary variant |
| | EDPEVQISWFVDGKQMQTAKTQPREEQFNGTYRVVSVLP | canine IgG-B Fc (0YH) |
| | IGHYDWLKGKQFTCKVNNKALPSPIERTISKARGQAHQP | Gln82Tyr |
| | SVYVLPPSREELSKNTVSLTCLIKDFFPPDIDVEWQSNG | Asn207His |
| | QQEPESKYRTTPPQLDEDGSYFLYSKLSVDKSRWQRGDT | |
| | FICAVMHEALHHHYTQESLSHSPGK | |
| 389 | PAPEMLGGPSVFIFPPKPKDTLLIARTPEVTCVVVDLDP | Exemplary variant |
| | EDPEVQISWFVDGKQMQTAKTQPREEQFNGTYRVVSVLP | canine IgG-B Fc (OYY) |
| | IGHYDWLKGKQFTCKVNNKALPSPIERTISKARGQAHQP | Gln82Tyr |
| | SVYVLPPSREELSKNTVSLTCLIKDFFPPDIDVEWQSNG | Asn207Tyr |
| | QQEPESKYRTTPPQLDEDGSYFLYSKLSVDKSRWQRGDT | |
| | FICAVMHEALHYHYTQESLSHSPGK | |
| 390 | PAPEMLGGPSVFIFPPKPKDTLLIARTPEVTCVVVDLDP | Exemplary variant |
| | EDPEVQISWFVDGKQMQTAKTQPREEQFNGTYRVVSVLP | canine IgG-B Fc (00Y) |
| | IGHQDWLKGKQFTCKVNNKALPSPIERTISKARGQAHQP | Asn207Tyr |
| | SVYVLPPSREELSKNTVSLTCLIKDFFPPDIDVEWQSNG | |
| | QQEPESKYRITPPQLDEDGSYFLYSKLSVDKSRWQRGDT | |
| | FICAVMHEALHYHYTQESLSHSPGK | |
| 391 | PAPEMLGGPSVFIFPPKPKDTLYITREPEVTCVVVDLDP | Exemplary variant |
| | EDPEVQISWFVDGKQMQTAKTQPREEQFNGTYRVVSVLP | canine IgG-B Fc (YTE) |
| | IGHQDWLKGKQFTCKVNNKALPSPIERTISKARGQAHQP | Leu23Tyr |
| | SVYVLPPSREELSKNTVSLTCLIKDFFPPDIDVEWQSNG | Ala25Thr |
| | QQEPESKYRTTPPQLDEDGSYFLYSKLSVDKSRWQRGDT | Thr27Glu |
| | FICAVMHEALHNHYTQESLSHSPGK | |
| 392 | PAPEMLGGPSVFIFPPKPKDTLFIARTPEVTCVVVDLDP | Exemplary variant |
| | EDPEVQISWFVDGKQMQTAKTQPREEQFNGTYRVVSVLP | canine IgG-B Fc |
| | IGHQDWLKGKQFTCRVNNIGLPSPIERTISKARGQAHQP | Protein A+ |
| | SVYVLPPSREELSKNTVSLTCLIKDFFPPDIDVEWQSNG | C1q− |
| | QQEPESKYRTTPPQLDEDGSYFLYSKLSVDKSRWQRGDT | CD16− |
| | FICAVMHEALHNHYTQESLSHSPGK | K(93)R |
| | | K(97)I |
| | | A(98)G |
| | | L(23)F (F00) |
| 393 | PAPEMLGGPSVFIFPPKPKDTLYIARTPEVTCVVVDLDP | Exemplary variant |
| | EDPEVQISWFVDGKQMQTAKTQPREEQFNGTYRVVSVLP | canine IgG-B Fc |
| | IGHQDWLKGKQFTCRVNNIGLPSPIERTISKARGQAHQP | Protein A+ |
| | SVYVLPPSREELSKNTVSLTCLIKDFFPPDIDVEWQSNG | C1q− |
| | QQEPESKYRTTPPQLDEDGSYFLYSKLSVDKSRWQRGDT | CD16 |
| | FICAVMHEALHNHYTQESLSHSPGK | K(93)R |
| | | K(97)I |
| | | A(98)G |
| | | L(23) Y (Y00) |
| 394 | PAPEMLGGPSVFIFPPKPKDTLLIARTPEVTCVVVDLDP | Exemplary variant |
| | EDPEVQISWFVDGKQMQTAKTQPREEQFNGTYRVVSVLP | canine IgG-B Fc |
| | IGHYDWLKGKQFTCRVNNIGLPSPIERTISKARGQAHQP | Protein A+ |
| | SVYVLPPSREELSKNTVSLTCLIKDFFPPDIDVEWQSNG | Clq− |
| | QQEPESKYRTTPPQLDEDGSYFLYSKLSVDKSRWQRGDT | CD16− |
| | FICAVMHEALHNHYTQESLSHSPGK | K(93)R |
| | | K(97)I |
| | | A(98)G |
| | | Q(82)Y (OY0) |
| 395 | EVQLVESGGDLVKPGGSLRLSCKASGYTFTSYVMHWVRQ | Caninized Clone I |
| | APGQGLEWVAYINPNNDGTFYNGAVKGRFTISRDNARNT | variable HC v1 and |
| | LYLQMNSLRSEDTAVYYCAAFYYGFAYWGQGTLVTVSSA | variant canine IgG-B |
| | STTAPSVFPLAPSCGSTSGSTVALACLVSGYFPEPVTVS | C1q−, CD16−, F00 |
| | WNSGSLTSGVHTFPSVLQSSGLYSLSSMVTVPSSRWPSE | |
| | TFTCNVAHPASKTKVDKPVPKRENGRVPRPPDCPKCPAP | |
| | EMLGGPSVFIFPPKPKDTLFIARTPEVTCVVVDLDPEDP | |
| | EVQISWFVDGKQMQTAKTQPREEQFNGTYRVVSVLPIGH | |
| | QDWLKGKQFTCRVNNIGLPSPIERTISKARGQAHQPSVY | |
| | VLPPSREELSKNTVSLTCLIKDFFPPDIDVEWQSNGQQE | |
| | PESKYRTTPPQLDEDGSYFLYSKLSVDKSRWQRGDTFIC | |
| | AVMHEALHNHYTQESLSHSPGK | |
| 396 | EVQLVQSGAEVKKPGASVKVSCKASGYTFTSYVMHWVRQ | Caninized Clone I |
| | APGQGLEWMGYINPNNDGTFYNGKFQGRVTLTADTSTST | variable HC v2 and |
| | AYMELSSLRAGDIAVYYCAAFYYGFAYWGQGTLVTVSSA | variant canine IgG-B |
| | STTAPSVFPLAPSCGSTSGSTVALACLVSGYFPEPVTVS | C1q−, CD16−, F00 |
| | WNSGSLTSGVHTFPSVLQSSGLYSLSSMVTVPSSRWPSE | |
| | TFTCNVAHPASKTKVDKPVPKRENGRVPRPPDCPKCPAP | |
| | EMLGGPSVFIFPPKPKDTLFIARTPEVTCVVVDLDPEDP | |
| | EVQISWFVDGKQMQTAKTQPREEQFNGTYRVVSVLPIGH | |
| | QDWLKGKQFTCRVNNIGLPSPIERTISKARGQAHQPSVY | |
| | VLPPSREELSKNTVSLTCLIKDFFPPDIDVEWQSNGQQE | |
| | PESKYRTTPPQLDEDGSYFLYSKLSVDKSRWQRGDTFIC | |
| | AVMHEALHNHYTQESLSHSPGK | |
| 397 | EVQLVQSAAEVKKPGASVKVSCKASGYTFTSYVMHWVRQ | Caninized Clone I |
| | APGQGLEWIGYINPNNDGTFYNGKFQGRVTLTADTSTGT | variable HC v3 and |
| | TYTELSSLRAEDTAVYYCAAFYYGFAYWGQGTLVTVSSA | variant canine IgG-B |
| | STTAPSVEPLAPSCGSTSGSTVALACLVSGYFPEPVTVS | Clq−, CD16−, F00 |
| | WNSGSLTSGVHTFPSVLQSSGLYSLSSMVTVPSSRWPSE | |
| | TFTCNVAHPASKTKVDKPVPKRENGRVPRPPDCPKCPAP | |
| | EMLGGPSVFIFPPKPKDTLFIARTPEVTCVVVDLDPEDP | |
| | EVQISWFVDGKQMQTAKTQPREEQFNGTYRVVSVLPIGH | |
| | QDWLKGKQFTCRVNNIGLPSPIERTISKARGQAHQPSVY | |
| | VLPPSREELSKNTVSLTCLIKDFFPPDIDVEWQSNGQQE | |
| | PESKYRTTPPQLDEDGSYFLYSKLSVDKSRWQRGDTFIC | |
| | AVMHEALHNHYTQESLSHSPGK | |
| 398 | EVQLVQSGAEVKKPGASVKVSCKASGYTFTSYVMHWVRQ | Caninized Clone I |
| | APGQGLEWMGYINPNNDGTFYNGKFQGRVTLTADTSTST | variable HC v4 and |
| | AYMELSSLRAGDIAVYYCAAFYYGFAYWGQGTLVTVSSA | variant canine IgG-B |
| | STTAPSVFPLAPSCGSTSGSTVALACLVSGYFPEPVTVS | Clq−, CD16−, F00 |
| | WNSGSLTSGVHTFPSVLQSSGLYSLSSMVTVPSSRWPSE | |
| | TFTCNVAHPASKTKVDKPVPKRENGRVPRPPDCPKCPAP | |
| | EMLGGPSVFIFPPKPKDTLFIARTPEVTCVVVDLDPEDP | |
| | EVQISWFVDGKQMQTAKTQPREEQFNGTYRVVSVLPIGH | |
| | QDWLKGKQFTCRVNNIGLPSPIERTISKARGQAHQPSVY | |
| | VLPPSREELSKNTVSLTCLIKDFFPPDIDVEWQSNGQQE | |
| | PESKYRTTPPQLDEDGSYFLYSKLSVDKSRWQRGDTFIC | |
| | AVMHEALHNHYTQESLSHSPGK | |
| 410 | EVQLVESGGDLVKPAGSLRLSCTVSGFSLSRYSVHWVRQ | Caninized Clone M3 |
| | APGKGLEWLGMIWGGGSTDYNSVVKGRFTISRDNAKNTV | variable HC v1 and |
| | YLQMNSLRAEDTAMYYCARTYRGYALDYWGQGTLVTVSS | variant canine IgG-B |
| | ASTTAPSVFPLAPSCGSTSGSTVALACLVSGYFPEPVTV | Clq−, CD16−, F00 |
| | SWNSGSLTSGVHTFPSVLQSSGLYSLSSMVTVPSSRWPS | |
| | ETFTCNVAHPASKTKVDKPVPKRENGRVPRPPDCPKCPA | |
| | PEMLGGPSVFIFPPKPKDTLFIARTPEVTCVVVDLDPED | |
| | PEVQISWFVDGKQMQTAKTQPREEQFNGTYRVVSVLPIG | |
| | HQDWLKGKQFTCRVNNIGLPSPIERTISKARGQAHQPSV | |
| | YVLPPSREELSKNTVSLTCLIKDFFPPDIDVEWQSNGQQ | |
| | EPESKYRTTPPQLDEDGSYFLYSKLSVDKSRWQRGDTFI | |
| | CAVMHEALHNHYTQESLSHSPGK | |
| 411 | ELTLQESGPGLVKPSQTLSLTCTVSGFSLSRYSVHWIRQ | Caninized Clone M3 |
| | PRGRGLELLGMIWGGGSTDYNPAFQGRISITADTAKNQF | variable HC v2 and |
| | SLQLSSMTTEDTAVYYCARTYRGYALDYWGQGTLVTVSS | variant canine IgG-B |
| | ASTTAPSVFPLAPSCGSTSGSTVALACLVSGYFPEPVTV | C1q−, CD16−, F00 |
| | SWNSGSLTSGVHTFPSVLQSSGLYSLSSMVTVPSSRWPS | |
| | ETFTCNVAHPASKTKVDKPVPKRENGRVPRPPDCPKCPA | |
| | PEMLGGPSVFIFPPKPKDTLFIARTPEVTCVVVDLDPED | |
| | PEVQISWFVDGKQMQTAKTQPREEQFNGTYRVVSVLPIG | |
| | HQDWLKGKQFTCRVNNIGLPSPIERTISKARGQAHQPSV | |
| | YVLPPSREELSKNTVSLTCLIKDFFPPDIDVEWQSNGQQ | |
| | EPESKYRTTPPQLDEDGSYFLYSKLSVDKSRWQRGDTFI | |
| | CAVMHEALHNHYTQESLSHSPGK | |
| 412 | EVQLVESGGDLVKPGGSLRLSCAASGFTFSSFGMHWVRQ | Caninized Clone M9 |
| | APGKGLEWVAYIRSDSSTIYYADAVKGRFTISRDNAKNT | variable HC v1 and |
| | LYLQMNSLRAEDTAMYYCARSGYYGSFSLTYWGQGTLVT | variant canine IgG-B |
| | VSSASTTAPSVFPLAPSCGSTSGSTVALACLVSGYFPEP | Clq−, CD16−, F00 |
| | VTVSWNSGSLTSGVHTFPSVLQSSGLYSLSSMVTVPSSR | |
| | WPSETFTCNVAHPASKTKVDKPVPKRENGRVPRPPDCPK | |
| | CPAPEMLGGPSVFIFPPKPKDTLFIARTPEVTCVVVDLD | |
| | PEDPEVQISWFVDGKQMQTAKTQPREEQFNGTYRVVSVL | |
| | PIGHQDWLKGKQFTCRVNNIGLPSPIERTISKARGQAHQ | |
| | PSVYVLPPSREELSKNTVSLTCLIKDFFPPDIDVEWQSN | |
| | GQQEPESKYRTTPPQLDEDGSYFLYSKLSVDKSRWQRGD | |
| | TFICAVMHEALHNHYTQESLSHSPGK | |
| 413 | EVQLVESGGDLVKPGGSLRLSCVASGFTFSSFGMHWVRQ | Caninized Clone M9 |
| | APGKGLQWVAYIRSDSSTIYYADAVKGRFTISRDNAKNT | variable HC v2 and |
| | LYLQMNSLRAEDTAMYYCARSGYYGSFSLTYWGQGTLVT | variant canine IgG-B |
| | VSSASTTAPSVFPLAPSCGSTSGSTVALACLVSGYFPEP | Clq−, CD16−, F00 |
| | VTVSWNSGSLTSGVHTFPSVLQSSGLYSLSSMVTVPSSR | |
| | WPSETFTCNVAHPASKTKVDKPVPKRENGRVPRPPDCPK | |
| | CPAPEMLGGPSVFIFPPKPKDTLFIARTPEVTCVVVDLD | |
| | PEDPEVQISWFVDGKQMQTAKTQPREEQFNGTYRVVSVL | |
| | PIGHQDWLKGKQFTCRVNNIGLPSPIERTISKARGQAHQ | |
| | PSVYVLPPSREELSKNTVSLTCLIKDFFPPDIDVEWQSN | |
| | GQQEPESKYRTTPPQLDEDGSYFLYSKLSVDKSRWQRGD | |
| | TFICAVMHEALHNHYTQESLSHSPGK | |
| 399 | EVQLVESGGDLVKPGGSLRLSCKASGYTFTSYVMHWVRQ | Caninized Clone I |
| | APGQGLEWVAYINPNNDGTFYNGAVKGRFTISRDNARNT | variable HC v1 and |
| | LYLQMNSLRSEDTAVYYCAAFYYGFAYWGQGTLVTVSSA | variant canine IgG-B |
| | STTAPSVFPLAPSCGSTSGSTVALACLVSGYFPEPVTVS | Clq−, CD16−, Y00 |
| | WNSGSLTSGVHTFPSVLQSSGLYSLSSMVTVPSSRWPSE | |
| | TFTCNVAHPASKTKVDKPVPKRENGRVPRPPDCPKCPAP | |
| | EMLGGPSVFIFPPKPKDTLYIARTPEVTCVVVDLDPEDP | |
| | EVQISWFVDGKQMQTAKTQPREEQFNGTYRVVSVLPIGH | |
| | QDWLKGKQFTCRVNNIGLPSPIERTISKARGQAHQPSVY | |
| | VLPPSREELSKNTVSLTCLIKDFFPPDIDVEWQSNGQQE | |
| | PESKYRTTPPQLDEDGSYFLYSKLSVDKSRWQRGDTFIC | |
| | AVMHEALHNHYTQESLSHSPGK | |
| 400 | EVQLVQSGAEVKKPGASVKVSCKASGYTFTSYVMHWVRQ | Caninized Clone I |
| | APGQGLEWMGYINPNNDGTFYNGKFQGRVTLTADTSTST | variable HC v2 and |
| | AYMELSSLRAGDIAVYYCAAFYYGFAYWGQGTLVTVSSA | variant canine IgG-B |
| | STTAPSVFPLAPSCGSTSGSTVALACLVSGYFPEPVTVS | Clq−, CD16−, Y00 |
| | WNSGSLTSGVHTFPSVLQSSGLYSLSSMVTVPSSRWPSE | |
| | TFTCNVAHPASKTKVDKPVPKRENGRVPRPPDCPKCPAP | |
| | EMLGGPSVFIFPPKPKDTLYIARTPEVTCVVVDLDPEDP | |
| | EVQISWFVDGKQMQTAKTQPREEQFNGTYRVVSVLPIGH | |
| | QDWLKGKQFTCRVNNIGLPSPIERTISKARGQAHQPSVY | |
| | VLPPSREELSKNTVSLTCLIKDFFPPDIDVEWQSNGQQE | |
| | PESKYRTTPPQLDEDGSYFLYSKLSVDKSRWQRGDTFIC | |
| | AVMHEALHNHYTQESLSHSPGK | |
| 401 | EVQLVQSAAEVKKPGASVKVSCKASGYTFTSYVMHWVRQ | Caninized Clone I |
| | APGQGLEWIGYINPNNDGTFYNGKFQGRVTLTADTSTGT | variable HC v3 and |
| | TYTELSSLRAEDTAVYYCAAFYYGFAYWGQGTLVTVSSA | variant canine IgG-B |
| | STTAPSVEPLAPSCGSTSGSTVALACLVSGYFPEPVTVS | C1q−, CD16−, Y00 |
| | WNSGSLTSGVHTFPSVLQSSGLYSLSSMVTVPSSRWPSE | |
| | TFTCNVAHPASKTKVDKPVPKRENGRVPRPPDCPKCPAP | |
| | EMLGGPSVFIFPPKPKDTLYIARTPEVTCVVVDLDPEDP | |
| | EVQISWFVDGKQMQTAKTQPREEQFNGTYRVVSVLPIGH | |
| | QDWLKGKQFTCRVNNIGLPSPIERTISKARGQAHQPSVY | |
| | VLPPSREELSKNTVSLTCLIKDFFPPDIDVEWQSNGQQE | |
| | PESKYRTTPPQLDEDGSYFLYSKLSVDKSRWQRGDTFIC | |
| | AVMHEALHNHYTQESLSHSPGK | |
| 402 | EVQLVQSGAEVKKPGASVKVSCKASGYTFTSYVMHWVRQ | Caninized Clone I |
| | APGQGLEWMGYINPNNDGTFYNGKFQGRVTLTADTSTST | variable HC v4 and |
| | AYMELSSLRAGDIAVYYCAAFYYGFAYWGQGTLVTVSSA | variant canine IgG-B |
| | STTAPSVFPLAPSCGSTSGSTVALACLVSGYFPEPVTVS | Clq−, CD16−, Y00 |
| | WNSGSLTSGVHTFPSVLQSSGLYSLSSMVTVPSSRWPSE | |
| | TFTCNVAHPASKTKVDKPVPKRENGRVPRPPDCPKCPAP | |
| | EMLGGPSVFIFPPKPKDTLYIARTPEVTCVVVDLDPEDP | |
| | EVQISWFVDGKQMQTAKTQPREEQFNGTYRVVSVLPIGH | |
| | QDWLKGKQFTCRVNNIGLPSPIERTISKARGQAHQPSVY | |
| | VLPPSREELSKNTVSLTCLIKDFFPPDIDVEWQSNGQQE | |
| | PESKYRTTPPQLDEDGSYFLYSKLSVDKSRWQRGDTFIC | |
| | AVMHEALHNHYTQESLSHSPGK | |
| 414 | EVQLVESGGDLVKPAGSLRLSCTVSGFSLSRYSVHWVRQ | Caninized Clone M3 |
| | APGKGLEWLGMIWGGGSTDYNSVVKGRFTISRDNAKNTV | variable HC v1 and |
| | YLQMNSLRAEDTAMYYCARTYRGYALDYWGQGTLVTVSS | variant canine IgG-B |
| | ASTTAPSVFPLAPSCGSTSGSTVALACLVSGYFPEPVTV | Clq−, CD16−, Y00 |
| | SWNSGSLTSGVHTFPSVLQSSGLYSLSSMVTVPSSRWPS | |
| | ETFTCNVAHPASKTKVDKPVPKRENGRVPRPPDCPKCPA | |
| | PEMLGGPSVFIFPPKPKDTLYIARTPEVTCVVVDLDPED | |
| | PEVQISWFVDGKQMQTAKTQPREEQFNGTYRVVSVLPIG | |
| | HQDWLKGKQFTCRVNNIGLPSPIERTISKARGQAHQPSV | |
| | YVLPPSREELSKNTVSLTCLIKDFFPPDIDVEWQSNGQQ | |
| | EPESKYRTTPPQLDEDGSYFLYSKLSVDKSRWQRGDTFI | |
| | CAVMHEALHNHYTQESLSHSPGK | |
| 415 | ELTLQESGPGLVKPSQTLSLTCTVSGFSLSRYSVHWIRQ | Caninized Clone M3 |
| | PRGRGLELLGMIWGGGSTDYNPAFQGRISITADTAKNQF | variable HC v2 and |
| | SLQLSSMTTEDTAVYYCARTYRGYALDYWGQGTLVTVSS | variant canine IgG-B |
| | ASTTAPSVFPLAPSCGSTSGSTVALACLVSGYFPEPVTV | C1q−, CD16−, Y00 |
| | SWNSGSLTSGVHTFPSVLQSSGLYSLSSMVTVPSSRWPS | |
| | ETFTCNVAHPASKTKVDKPVPKRENGRVPRPPDCPKCPA | |
| | PEMLGGPSVFIFPPKPKDTLYIARTPEVTCVVVDLDPED | |
| | PEVQISWFVDGKQMQTAKTQPREEQFNGTYRVVSVLPIG | |
| | HQDWLKGKQFTCRVNNIGLPSPIERTISKARGQAHQPSV | |
| | YVLPPSREELSKNTVSLTCLIKDFFPPDIDVEWQSNGQQ | |
| | EPESKYRTTPPQLDEDGSYFLYSKLSVDKSRWQRGDTFI | |
| | CAVMHEALHNHYTQESLSHSPGK | |
| 416 | EVQLVESGGDLVKPGGSLRLSCAASGFTFSSFGMHWVRQ | Caninized Clone M9 |
| | APGKGLEWVAYIRSDSSTIYYADAVKGRFTISRDNAKNT | variable HC v1 and |
| | LYLQMNSLRAEDTAMYYCARSGYYGSFSLTYWGQGTLVT | variant canine IgG-B |
| | VSSASTTAPSVFPLAPSCGSTSGSTVALACLVSGYFPEP | C1q−, CD16−, Y00 |
| | VTVSWNSGSLTSGVHTFPSVLQSSGLYSLSSMVTVPSSR | |
| | WPSETFTCNVAHPASKTKVDKPVPKRENGRVPRPPDCPK | |
| | CPAPEMLGGPSVFIFPPKPKDTLYIARTPEVTCVVVDLD | |
| | PEDPEVQISWFVDGKQMQTAKTQPREEQFNGTYRVVSVL | |
| | PIGHQDWLKGKQFTCRVNNIGLPSPIERTISKARGQAHQ | |
| | PSVYVLPPSREELSKNTVSLTCLIKDFFPPDIDVEWQSN | |
| | GQQEPESKYRITPPQLDEDGSYFLYSKLSVDKSRWQRGD | |
| | TFICAVMHEALHNHYTQESLSHSPGK | |
| 417 | EVQLVESGGDLVKPGGSLRLSCVASGFTFSSFGMHWVRQ | Caninized Clone M9 |
| | APGKGLQWVAYIRSDSSTIYYADAVKGRFTISRDNAKNT | variable HC v2 and |
| | LYLQMNSLRAEDTAMYYCARSGYYGSFSLTYWGQGTLVT | variant canine IgG-B |
| | VSSASTTAPSVFPLAPSCGSTSGSTVALACLVSGYFPEP | Clq−, CD16−, Y00 |
| | VTVSWNSGSLTSGVHTFPSVLQSSGLYSLSSMVTVPSSR | |
| | WPSETFTCNVAHPASKTKVDKPVPKRENGRVPRPPDCPK | |
| | CPAPEMLGGPSVFIFPPKPKDTLYIARTPEVTCVVVDLD | |
| | PEDPEVQISWFVDGKQMQTAKTQPREEQFNGTYRVVSVL | |
| | PIGHQDWLKGKQFTCRVNNIGLPSPIERTISKARGQAHQ | |
| | PSVYVLPPSREELSKNTVSLTCLIKDFFPPDIDVEWQSN | |
| | GQQEPESKYRTTPPQLDEDGSYFLYSKLSVDKSRWQRGD | |
| | TFICAVMHEALHNHYTQESLSHSPGK | |
| 403 | EVQLVESGGDLVKPGGSLRLSCKASGYTFTSYVMHWVRQ | Caninized Clone I |
| | APGQGLEWVAYINPNNDGTFYNGAVKGRFTISRDNARNT | variable HC v1 and |
| | LYLQMNSLRSEDTAVYYCAAFYYGFAYWGQGTLVTVSSA | variant canine IgG-B |
| | STTAPSVFPLAPSCGSTSGSTVALACLVSGYFPEPVTVS | Clq−, CD16−, 0Y0 |
| | WNSGSLTSGVHTFPSVLQSSGLYSLSSMVTVPSSRWPSE | |
| | TFTCNVAHPASKTKVDKPVPKRENGRVPRPPDCPKCPAP | |
| | EMLGGPSVFIFPPKPKDTLLIARTPEVTCVVVDLDPEDP | |
| | EVQISWFVDGKQMQTAKTQPREEQFNGTYRVVSVLPIGH | |
| | YDWLKGKQFTCRVNNIGLPSPIERTISKARGQAHQPSVY | |
| | VLPPSREELSKNTVSLTCLIKDFFPPDIDVEWQSNGQQE | |
| | PESKYRTTPPQLDEDGSYFLYSKLSVDKSRWQRGDTFIC | |
| | AVMHEALHNHYTQESLSHSPGK | |
| 404 | EVQLVQSGAEVKKPGASVKVSCKASGYTFTSYVMHWVRQ | Caninized Clone I |
| | APGQGLEWMGYINPNNDGTFYNGKFQGRVTLTADTSTST | variable HC v2 and |
| | AYMELSSLRAGDIAVYYCAAFYYGFAYWGQGTLVTVSSA | variant canine IgG-B |
| | STTAPSVFPLAPSCGSTSGSTVALACLVSGYFPEPVTVS | C1q−, CD16−, 0Y0 |
| | WNSGSLTSGVHTFPSVLQSSGLYSLSSMVTVPSSRWPSE | |
| | TFTCNVAHPASKTKVDKPVPKRENGRVPRPPDCPKCPAP | |
| | EMLGGPSVFIFPPKPKDTLLIARTPEVTCVVVDLDPEDP | |
| | EVQISWFVDGKQMQTAKTQPREEQFNGTYRVVSVLPIGH | |
| | YDWLKGKQFTCRVNNIGLPSPIERTISKARGQAHQPSVY | |
| | VLPPSREELSKNTVSLTCLIKDFFPPDIDVEWQSNGQQE | |
| | PESKYRTTPPQLDEDGSYFLYSKLSVDKSRWQRGDTFIC | |
| | AVMHEALHNHYTQESLSHSPGK | |
| 405 | EVQLVQSAAEVKKPGASVKVSCKASGYTFTSYVMHWVRQ | Caninized Clone I |
| | APGQGLEWIGYINPNNDGTFYNGKFQGRVTLTADTSTGT | variable HC v3 and |
| | TYTELSSLRAEDTAVYYCAAFYYGFAYWGQGTLVTVSSA | variant canine IgG-B |
| | STTAPSVFPLAPSCGSTSGSTVALACLVSGYFPEPVTVS | C1q−, CD16−,0Y0 |
| | WNSGSLTSGVHTFPSVLQSSGLYSLSSMVTVPSSRWPSE | |
| | TFTCNVAHPASKTKVDKPVPKRENGRVPRPPDCPKCPAP | |
| | EMLGGPSVFIFPPKPKDTLLIARTPEVTCVVVDLDPEDP | |
| | EVQISWFVDGKQMQTAKTQPREEQFNGTYRVVSVLPIGH | |
| | YDWLKGKQFTCRVNNIGLPSPIERTISKARGQAHQPSVY | |
| | VLPPSREELSKNTVSLTCLIKDFFPPDIDVEWQSNGQQE | |
| | PESKYRTTPPQLDEDGSYFLYSKLSVDKSRWQRGDTFIC | |
| | AVMHEALHNHYTQESLSHSPGK | |
| 406 | EVQLVQSGAEVKKPGASVKVSCKASGYTFTSYVMHWVRQ | Caninized Clone I |
| | APGQGLEWMGYINPNNDGTFYNGKFQGRVTLTADTSTST | variable HC v4 and |
| | AYMELSSLRAGDIAVYYCAAFYYGFAYWGQGTLVTVSSA | variant canine IgG-B |
| | STTAPSVFPLAPSCGSTSGSTVALACLVSGYFPEPVTVS | Clq−, CD16−,0Y0 |
| | WNSGSLTSGVHTFPSVLQSSGLYSLSSMVTVPSSRWPSE | |
| | TFTCNVAHPASKTKVDKPVPKRENGRVPRPPDCPKCPAP | |
| | EMLGGPSVFIFPPKPKDTLLIARTPEVTCVVVDLDPEDP | |
| | EVQISWFVDGKQMQTAKTQPREEQFNGTYRVVSVLPIGH | |
| | YDWLKGKQFTCRVNNIGLPSPIERTISKARGQAHQPSVY | |
| | VLPPSREELSKNTVSLTCLIKDFFPPDIDVEWQSNGQQE | |
| | PESKYRTTPPQLDEDGSYFLYSKLSVDKSRWQRGDTFIC | |
| | AVMHEALHNHYTQESLSHSPGK | |
| 418 | EVQLVESGGDLVKPAGSLRLSCTVSGFSLSRYSVHWVRQ | Caninized Clone M3 |
| | APGKGLEWLGMIWGGGSTDYNSVVKGRFTISRDNAKNTV | variable HC v1 and |
| | YLQMNSLRAEDTAMYYCARTYRGYALDYWGQGTLVTVSS | variant canine IgG-B |
| | ASTTAPSVFPLAPSCGSTSGSTVALACLVSGYFPEPVTV | C1q−, CD16−, 0Y0 |
| | SWNSGSLISGVHTFPSVLQSSGLYSLSSMVTVPSSRWPS | |
| | ETFTCNVAHPASKTKVDKPVPKRENGRVPRPPDCPKCPA | |
| | PEMLGGPSVFIFPPKPKDTLLIARTPEVTCVVVDLDPED | |
| | PEVQISWFVDGKQMQTAKTQPREEQFNGTYRVVSVLPIG | |
| | HYDWLKGKQFTCRVNNIGLPSPIERTISKARGQAHQPSV | |
| | YVLPPSREELSKNTVSLTCLIKDFFPPDIDVEWQSNGQQ | |
| | EPESKYRTTPPQLDEDGSYFLYSKLSVDKSRWQRGDTFI | |
| | CAVMHEALHNHYTQESLSHSPGK | |
| 419 | ELTLQESGPGLVKPSQTLSLTCTVSGFSLSRYSVHWIRQ | Caninized Clone M3 |
| | PRGRGLELLGMIWGGGSTDYNPAFQGRISITADTAKNQF | variable HC v2 and |
| | SLQLSSMTTEDTAVYYCARTYRGYALDYWGQGTLVTVSS | variant canine IgG-B |
| | ASTTAPSVFPLAPSCGSTSGSTVALACLVSGYFPEPVTV | Clq−, CD16−, 0Y0 |
| | SWNSGSLTSGVHTFPSVLQSSGLYSLSSMVTVPSSRWPS | |
| | ETFTCNVAHPASKTKVDKPVPKRENGRVPRPPDCPKCPA | |
| | PEMLGGPSVFIFPPKPKDTLLIARTPEVTCVVVDLDPED | |
| | PEVQISWFVDGKQMQTAKTQPREEQFNGTYRVVSVLPIG | |
| | HYDWLKGKQFTCRVNNIGLPSPIERTISKARGQAHQPSV | |
| | YVLPPSREELSKNTVSLTCLIKDFFPPDIDVEWQSNGQQ | |
| | EPESKYRTTPPQLDEDGSYFLYSKLSVDKSRWQRGDIFI | |
| | CAVMHEALHNHYTQESLSHSPGK | |
| 420 | EVQLVESGGDLVKPGGSLRLSCAASGFTFSSFGMHWVRQ | Caninized Clone M9 |
| | APGKGLEWVAYIRSDSSTIYYADAVKGRFTISRDNAKNT | variable HC v1 and |
| | LYLQMNSLRAEDTAMYYCARSGYYGSFSLTYWGQGTLVT | variant canine IgG-B |
| | VSSASTTAPSVFPLAPSCGSTSGSTVALACLVSGYFPEP | Clq−, CD16−, 0Y0 |
| | VTVSWNSGSLTSGVHTFPSVLQSSGLYSLSSMVTVPSSR | |
| | WPSETFTCNVAHPASKTKVDKPVPKRENGRVPRPPDCPK | |
| | CPAPEMLGGPSVFIFPPKPKDTLLIARTPEVTCVVVDLD | |
| | PEDPEVQISWFVDGKQMQTAKTQPREEQFNGTYRVVSVL | |
| | PIGHYDWLKGKQFTCRVNNIGLPSPIERTISKARGQAHQ | |
| | PSVYVLPPSREELSKNTVSLTCLIKDFFPPDIDVEWQSN | |
| | GQQEPESKYRTTPPQLDEDGSYFLYSKLSVDKSRWQRGD | |
| | TFICAVMHEALHNHYTQESLSHSPGK | |
| 421 | EVQLVESGGDLVKPGGSLRLSCVASGFTFSSFGMHWVRQ | Caninized Clone M9 |
| | APGKGLQWVAYIRSDSSTIYYADAVKGRFTISRDNAKNT | variable HC v2 and |
| | LYLQMNSLRAEDTAMYYCARSGYYGSFSLTYWGQGTLVT | variant canine IgG-B |
| | VSSASTTAPSVFPLAPSCGSTSGSTVALACLVSGYFPEP | C1q−, CD16−,0Y0 |
| | VTVSWNSGSLTSGVHTFPSVLQSSGLYSLSSMVTVPSSR | |
| | WPSETFTCNVAHPASKTKVDKPVPKRENGRVPRPPDCPK | |
| | CPAPEMLGGPSVFIFPPKPKDTLLIARTPEVTCVVVDLD | |
| | PEDPEVQISWFVDGKQMQTAKTQPREEQFNGTYRVVSVL | |
| | PIGHYDWLKGKQFTCRVNNIGLPSPIERTISKARGQAHQ | |
| | PSVYVLPPSREELSKNTVSLTCLIKDFFPPDIDVEWQSN | |
| | GQQEPESKYRTTPPQLDEDGSYFLYSKLSVDKSRWQRGD | |
| | TFICAVMHEALHNHYTQESLSHSPGK | |

### DESCRIPTION OF CERTAIN EMBODIMENTS

[0366] Antibodies that bind canine IL4R and/or feline IL4R are provided. Antibody heavy chains and light chains that are capable of forming antibodies that bind IL4R are also provided. In addition, antibodies, heavy chains, and light chains comprising one or more particular complementary determining regions (CDRs) are provided. Polynucleotides encoding antibodies to canine or feline IL4R are provided. Methods of producing or purifying antibodies to canine or feline IL4R are also provided. Methods of treatment using antibodies to canine and/or feline IL4/IL13 are provided. Such methods include, but are not limited to, methods of treating IL4-induced conditions and/or IL13-induced conditions in companion animal species. Methods of detecting soluble IL4R in a sample from a companion animal species are provided. Methods of screening for molecules that inhibit IL4 and/or IL13 signaling function (e.g., anti-IL4R, anti-IL13R, anti-IL4, and anti-IL13 antibodies and small molecule antagonists of IL4R, IL13R, IL4, and IL13) are also provided.

[0367] Also provided are variant IgG Fc polypeptides from companion animals, such as canine and feline, having increased binding to Protein A, decreased binding to C1q, decreased binding to CD16, increased binding to FcRn, increased stability, increased recombinant production, and/or increased hinge disulfide formation that may be used in the context of the canine or feline IL4R antibodies provided herein. In addition, provided herein are variant IgG Fc polypeptides and variant light chain constant regions from companion animals, such as canine, feline, and equine, for preparation of bispecific antibodies, including anti-IL4R antibodies. In some embodiments, anti-IL4R antibodies or antibody fragments comprise a variant IgG Fc polypeptide or a variant light chain constant region. Methods for preparing anti-IL4R antibodies and bispecific antibodies incorporating variant IgG Fc polypeptides are provided.

[0368] Novel antibodies directed against IL4R are provided, for example antibodies that bind to canine IL4R and/or feline IL4R. Anti-IL4R antibodies provided herein include, but are not limited to, monoclonal antibodies, mouse antibodies, chimeric antibodies, caninized antibodies, felinized antibodies, and bispecific antibodies. In some embodiments, an anti-IL4R antibody is an isolated mouse monoclonal antibody, such as Clone B, Clone I, M3, M5, M8, or M9.

[0369] Hybridoma clones were obtained after immunization of mice with canine IL4R using standard hybridoma technology. Monoclonal antibody Clone B, Clone I, M3, M5, M8, and M9 were selected for further investigation following enzyme linked immunosorbent assay (ELISA) screening, binding affinity assays, and in vitro neutralization assay. The heavy and light chains of Clone B and Clone I were sequenced and analyzed by sequence alignment (FIG. 1; SEQ ID NO: 27 (Clone B HC), SEQ ID NO: 28 (Clone B LC), SEQ ID NO: 49 (Clone I HC), and SEQ ID NO: 50 (Clone I LC)). The variable heavy (VH) and variable light (VL) chains of M3, M5, M8, and M9 were also sequenced (SEQ ID NO: 292 (M3 VH), SEQ ID NO: 293 (M3 VL), SEQ ID NO: 308 (M5 VH), SEQ ID NO: 309 (M5 VL), SEQ ID NO: 324 (M8 VH), SEQ ID NO: 325 (M8 VL), SEQ ID NO: 340 (M9 VH), and SEQ ID NO: 341 (M9 VL).

[0370] Also provided herein are amino acid sequences of monoclonal antibody Clone B and Clone I. Exemplary consensus CDR sequences were identified as CDR-H1: GYTFTSYVMX₁ (SEQ ID NO: 1), wherein X1 is H or N, CDR-H2: YINPX₂NDGTFYX₃GX₄X₅X₆G (SEQ ID NO: 2), wherein X₂ is K, A, or N; X₃ is N or A; X₄ K or A; X₅ is F or V; and X₆ is K or Q, or YINPX₂NDGT (SEQ ID NO: 268), wherein X₂ is K, A, or N; CDR-H3: FX₇YGX₈AY (SEQ ID NO: 3), wherein X₇ is N or Y; and X₈ is I or F, CDR-L1: RASQEISGYLX₉ (SEQ ID NO: 4), wherein X₉ is S or A; CDR-L2: AASX₁₀X₁₁DX₁₂ (SEQ ID NO: 5), wherein X₁₀ is T or N; X₁₁ is R or L; and X₁₂ is S or T; and CDR-L3: X₁₃QYASYPWT (SEQ ID NO: 6), wherein X₁₃ is V or L.

[0371] In addition, for example, variable heavy chain CDRs (SEQ ID NO: 7, SEQ ID NO: 8, SEQ ID NO: 269, and SEQ ID NO: 9), variable light chain CDRs (SEQ ID NO: 14, SEQ ID NO: 15, and SEQ ID NO: 16), variable region heavy chain framework sequences (SEQ ID NO: 10, SEQ ID NO: 11, SEQ ID NO: 12, SEQ ID NO: 270, and SEQ ID NO: 13), and variable region light chain framework sequences (SEQ ID NO: 17, SEQ ID NO: 18, SEQ ID NO: 19, and SEQ ID NO: 20) for monoclonal antibody Clone B are provided Amino acid sequences of the variable heavy chain and variable light chain of monoclonal antibody Clone B are provided with and without leader sequence (SEQ ID NO: 21, SEQ ID NO: 22, SEQ ID NO: 23, and SEQ ID NO: 24). Amino acid sequences of the heavy chain and light chain of Clone B are provided with and without leader sequence (SEQ ID NO: 25, SEQ ID NO: 26, SEQ ID NO: 27, and SEQ ID NO: 28).

[0372] As another example, variable heavy chain CDRs (SEQ ID NO: 29, SEQ ID NO: 358, SEQ ID NO: 30, SEQ ID NO: 271, SEQ ID NO: 359, SEQ ID NO: 272, and SEQ ID NO: 31), variable light chain CDRs (SEQ ID NO: 36, SEQ ID NO: 360, SEQ ID NO: 37, SEQ ID NO: 361, SEQ ID NO: 362, and SEQ ID NO: 38), variable region heavy chain framework sequences (SEQ ID NO: 32, SEQ ID NO: 33, SEQ ID NO: 34, SEQ ID NO: 273, and SEQ ID NO: 35), and variable region light chain framework sequences (SEQ ID NO: 39, SEQ ID NO: 40, SEQ ID NO: 41, and SEQ ID NO: 42) for monoclonal antibody Clone I are provided. Amino acid sequences of the variable heavy chain and variable light chain of monoclonal antibody Clone I are provided with and without leader sequence (SEQ ID NO: 43, SEQ ID NO: 44, SEQ ID NO: 45, and SEQ ID NO: 46). Amino acid sequences of the heavy chain and light chain of Clone I are provided with and without leader sequence (SEQ ID NO: 47, SEQ ID NO: 48, SEQ ID NO: 49, and SEQ ID NO: 50).

[0373] As a further example, variable heavy chain CDRs (SEQ ID NO: 278, SEQ ID NO: 279, SEQ ID NO: 280), variable light chain CDRs (SEQ ID NO: 285, SEQ ID NO: 286, and SEQ ID NO: 287), variable region heavy chain framework sequences (SEQ ID NOs: 281-284), and variable region light chain framework sequences (SEQ ID NOs: 288-291) for M3 are provided.

[0374] As another example, variable heavy chain CDRs (SEQ ID NO: 294, SEQ ID NO: 295, SEQ ID NO: 296), variable light chain CDRs (SEQ ID NO: 301, SEQ ID NO: 302, and SEQ ID NO: 303), variable region heavy chain framework sequences (SEQ ID NOs: 297-300), and variable region light chain framework sequences (SEQ ID NOs: 304-307) for M5 are provided.

[0375] Further exemplified herein are variable heavy chain CDRs (SEQ ID NO: 310, SEQ ID NO: 311, SEQ ID NO: 312), variable light chain CDRs (SEQ ID NO: 317, SEQ ID NO: 318, and SEQ ID NO: 319), variable region heavy chain framework sequences (SEQ ID NOs: 313-316), and variable region light chain framework sequences (SEQ ID NOs: 320-323) for M8.

[0376] Also exemplified herein are variable heavy chain CDRs (SEQ ID NO: 326, SEQ ID NO: 407, SEQ ID NO: 327, and SEQ ID NO: 328), variable light chain CDRs (SEQ ID NO: 333, SEQ ID NO: 334, and SEQ ID NO: 335), variable region heavy chain framework sequences (SEQ ID NOs: 329-332), and variable region light chain framework sequences (SEQ ID NOs: 336-339) for M9.

[0377] Also provided herein are chimeric, caninized, and felinized antibodies derived from monoclonal antibody Clone B, Clone I, M3, M5, M8, and M9. In some embodiments, amino acid sequences of chimeric antibodies derived from Clone B are provided, such as SEQ ID NO: 51, SEQ ID NO: 52, SEQ ID NO: 53, and SEQ ID NO: 54, In some embodiments, amino acid sequences of chimeric antibodies derived from Clone I are provided, such as SEQ ID NO: 55, SEQ ID NO: 56, SEQ ID NO: 57, and SEQ ID NO: 58. In some embodiments, amino acid sequences of caninized Clone B are provided, such as SEQ ID NO: 59, SEQ ID NO: 60, SEQ ID NO: 61, SEQ ID NO: 62, SEQ ID NO: 71, SEQ ID NO: 72, SEQ ID NO: 73, and SEQ ID NO: 74. In some embodiments, amino acid sequences of caninized Clone I are provided, such as SEQ ID NO: 63, SEQ ID NO: 64, SEQ ID NO: 274, SEQ ID NO: 363, SEQ ID NO: 65, SEQ ID NO: 66, SEQ ID NO: 275, SEQ ID NO: 364, SEQ ID NO: 75, SEQ ID NO: 76, SEQ ID NO: 276, SEQ ID NO: 370, SEQ ID NO: 77, SEQ ID NO: 78, SEQ ID NO: 277, SEQ ID NO: 371, SEQ ID NO: 395, SEQ ID NO: 396, SEQ ID NO: 397, SEQ ID NO: 398, SEQ ID NO: 399, SEQ ID NO: 400, SEQ ID NO: 401, SEQ ID NO: 402, SEQ ID NO: 403, SEQ ID NO: 404, SEQ ID NO: 405, SEQ ID NO: 406, SEQ ID NO: 410, SEQ ID NO: 411, SEQ ID NO: 412, SEQ ID NO: 413, SEQ ID NO: 414, SEQ ID NO: 415, SEQ ID NO: 416, SEQ ID NO: 417, SEQ ID NO: 418, SEQ ID NO: 419, SEQ ID NO: 420, and SEQ ID NO: 421. In some embodiments, amino acid sequences of felinized antibodies derived from Clone B are provided, such as SEQ ID NO: 67, SEQ ID NO: 68, SEQ ID NO: 79, SEQ ID NO: 80, and SEQ ID NO: 81. In some embodiments, amino acid sequences of felinized antibodies derived from Clone I are provided, such as SEQ ID NO: 69, SEQ ID NO: 70, SEQ ID NO: 82, SEQ ID NO: 372, SEQ ID NO: 373, SEQ ID NO: 83, SEQ ID NO: 374, SEQ ID NO: 375, SEQ ID NO: 84, SEQ ID NO: 376, SEQ ID NO: 377, and SEQ ID NO: 378. In some embodiments, amino acid sequences of caninized antibodies derived from M3 are provided, such as SEQ ID NO: 342, SEQ ID NO: 343, SEQ ID NO: 344, SEQ ID NO: 348, SEQ ID NO: 349, and SEQ ID NO: 350. In some embodiments, amino acid sequences of caninized antibodies derived from M9 are provided, such as SEQ ID NO: 345, SEQ ID NO: 346, SEQ ID NO: 347, SEQ ID NO: 408, SEQ ID NO: 351, SEQ ID NO: 352, SEQ ID NO: 353, and SEQ ID NO: 409.

[0378] As used herein, numerical terms such as Kd are calculated based upon scientific measurements and, thus, are subject to appropriate measurement error. In some instances, a numerical term may include numerical values that are rounded to the nearest significant figure.

[0379] As used herein, “a” or “an” means “at least one” or “one or more” unless otherwise specified. As used herein, the term “or” means “and/or” unless specified otherwise. In the context of a multiple dependent claim, the use of “or” when referring back to other claims refers to those claims in the alternative only.

[0380] The term “antibody” herein is used in the broadest sense and encompasses various antibody structures, including but not limited to monoclonal antibodies, polyclonal antibodies, multispecific antibodies (for example, bispecific (such as Bi-specific T-cell engagers) and trispecific antibodies), and antibody fragments (such as Fab, F(ab′) 2, ScFv, minibody, diabody, triabody, and tetrabody) so long as they exhibit the desired antigen-binding activity. Canine, feline, and equine species have different varieties (classes) of antibodies that are shared by many mammalians.

[0381] The term antibody includes, but is not limited to, fragments that are capable of binding to an antigen, such as Fv, single-chain Fv (scFv), Fab, Fab′, di-scFv, sdAb (single domain antibody) and (Fab′) 2 (including a chemically linked F(ab′) 2). Papain digestion of antibodies produces two identical antigen-binding fragments, called “Fab” fragments, each with a single antigen-binding site, and a residual “Fc” fragment, whose name reflects its ability to crystallize readily. Pepsin treatment yields an F(ab′)2 fragment that has two antigen combining sites and is still capable of cross-linking antigen. The term antibody also includes, but is not limited to, chimeric antibodies, humanized antibodies, and antibodies of various species such as mouse, human, cynomolgus monkey, canine, feline, equine, etc. Furthermore, for all antibody constructs provided herein, variants having the sequences from other organisms are also contemplated. Thus, if a murine version of an antibody is disclosed, one of skill in the art will appreciate how to transform the murine sequence-based antibody into a cat, dog, horse, etc. sequence. Antibody fragments also include either orientation of single chain scFvs, tandem di-scFv, diabodies, tandem tri-sdcFv, minibodies, etc. Antibody fragments also include nanobodies (sdAb, an antibody having a single, monomeric domain, such as a pair of variable domains of heavy chains, without a light chain). An antibody fragment can be referred to as being a specific species in some embodiments (for example, mouse scFv or a canine scFv). This denotes the sequences of at least part of the non-CDR regions, rather than the source of the construct. In some embodiments, the antibodies comprise a label or are conjugated to a second moiety.

[0382] The terms “label” and “detectable label” mean a moiety attached to an antibody or its analyte to render a reaction (for example, binding) between the members of the specific binding pair, detectable. The labeled member of the specific binding pair is referred to as “detectably labeled.” Thus, the term “labeled binding protein” refers to a protein with a label incorporated that provides for the identification of the binding protein. In some embodiments, the label is a detectable marker that can produce a signal that is detectable by visual or instrumental means, for example, incorporation of a radiolabeled amino acid or attachment to a polypeptide of biotinyl moieties that can be detected by marked avidin (for example, streptavidin containing a fluorescent marker or enzymatic activity that can be detected by optical or colorimetric methods). Examples of labels for polypeptides include, but are not limited to, the following: radioisotopes or radionuclides (for example, ³H, ¹⁴C, ³⁵S, ⁹⁰Y, ⁹⁹Tc, ¹¹¹In, ¹²⁵I, ¹³¹I, ¹⁷⁷Lu, ¹⁶⁶Ho, or ¹⁵³Sm); chromogens, fluorescent labels (for example, FITC, rhodamine, lanthanide phosphors), enzymatic labels (for example, horseradish peroxidase, luciferase, alkaline phosphatase); chemiluminescent markers; biotinyl groups; predetermined polypeptide epitopes recognized by a secondary reporter (for example, leucine zipper pair sequences, binding sites for secondary antibodies, metal binding domains, epitope tags); and magnetic agents, such as gadolinium chelates. Representative examples of labels commonly employed for immunoassays include moieties that produce light, for example, acridinium compounds, and moieties that produce fluorescence, for example, fluorescein. In this regard, the moiety itself may not be detectably labeled but may become detectable upon reaction with yet another moiety.

[0383] The term “monoclonal antibody” refers to an antibody of a substantially homogeneous population of antibodies, that is, the individual antibodies comprising the population are identical except for possible naturally-occurring mutations that may be present in minor amounts. Monoclonal antibodies are highly specific, being directed against a single antigenic site. Furthermore, in contrast to polyclonal antibody preparations, which typically include different antibodies directed against different determinants (epitopes), each monoclonal antibody is directed against a single determinant on the antigen. Thus, a sample of monoclonal antibodies can bind to the same epitope on the antigen. The modifier “monoclonal” indicates the character of the antibody as being obtained from a substantially homogeneous population of antibodies, and is not to be construed as requiring production of the antibody by any particular method. For example, the monoclonal antibodies may be made by the hybridoma method first described by Kohler and Milstein, 1975, Nature 256:495, or may be made by recombinant DNA methods such as described in U.S. Pat. No. 4,816,567. The monoclonal antibodies may also be isolated from phage libraries generated using the techniques described in McCafferty et al., 1990, Nature 348:552-554, for example.

[0384] In some embodiments, the monoclonal antibody is an isolated mouse antibody selected from Clone B, Clone I, M3, M5, M8, and M9.

[0385] “Amino acid sequence,” means a sequence of amino acids residues in a peptide or protein. The terms “polypeptide” and “protein” are used interchangeably to refer to a polymer of amino acid residues, and are not limited to a minimum length. Such polymers of amino acid residues may contain natural or non-natural amino acid residues, and include, but are not limited to, peptides, oligopeptides, dimers, trimers, and multimers of amino acid residues. Both full-length proteins and fragments thereof are encompassed by the definition. The terms also include post-expression modifications of the polypeptide, for example, glycosylation, sialylation, acetylation, phosphorylation, and the like. Furthermore, for purposes of the present disclosure, a “polypeptide” refers to a protein which includes modifications, such as deletions, additions, and substitutions (generally conservative in nature), to the native sequence, as long as the protein maintains the desired activity. These modifications may be deliberate, as through site-directed mutagenesis, or may be accidental, such as through mutations of hosts which produce the proteins or errors due to PCR amplification.

[0386] As used herein, “percent (%) amino acid sequence identity” and “homology” with respect to a peptide, polypeptide, or antibody sequence are defined as the percentage of amino acid residues in a candidate sequence that are identical with the amino acid residues in the specific peptide or polypeptide sequence, after aligning the sequences and introducing gaps, if necessary to achieve the maximum percent sequence identity, and not considering any conservative substitutions as part of the sequence identity. Alignment for purposes of determining percent amino acid sequence identity can be achieved in various ways that are within the skill in the art, for instance, using publicly available computer software such as BLAST, BLAST-2, ALIGN, or MEGALINE™ (DNASTAR) software. Those skilled in the art can determine appropriate parameters for measuring alignment, including any algorithms needed to achieve maximal alignment over the full length of sequences being compared.

[0387] In some embodiments, a variant has at least about 50% sequence identity with the reference nucleic acid molecule or polypeptide after aligning the sequences and introducing gaps, if necessary, to achieve the maximum percent sequence identity, and not considering any conservative substitutions as part of the sequence identity. Such variants include, for instance, polypeptides wherein one or more amino acid residues are added, deleted, at the N- or C-terminus of the polypeptide. In some embodiments, a variant has at least about 50% sequence identity, at least about 60% sequence identity, at least about 65% sequence identity, at least about 70% sequence identity, at least about 75% sequence identity, at least about 80% sequence identity, at least about 85% sequence identity, at least about 90% sequence identity, at least about 95% sequence identity, at least about 97% sequence identity, at least about 98% sequence identity, or at least about 99% sequence identity with the sequence of the reference nucleic acid or polypeptide.

[0388] A “point mutation” is a mutation that involves a single amino acid residue. The mutation may be the loss of an amino acid, substitution of one amino acid residue for another, or the insertion of an additional amino acid residue.

[0389] An “amino acid substitution” refers to the replacement of one amino acid in a polypeptide with another amino acid. In some embodiments, an amino acid substitution is a conservative substitution. Nonlimiting exemplary conservative amino acid substitutions are shown in Table 2 Amino acid substitutions may be introduced into a molecule of interest and the products screened for a desired activity, for example, retained/improved antigen binding, decreased immunogenicity, improved ADCC or CDC, improved recombinant production, and/or enhanced pharmacokinetics.

TABLE 2

| Original | |
|---|---|
| Residue | Exemplary Substitutions |
| Ala (A) | Val; Leu; Ile |
| Arg (R) | Lys; Gln; Asn |
| Asn (N) | Gln; His; Asp; Lys; Arg |
| Asp (D) | Glu; Asn |
| Cys (C) | Ser; Ala |
| Gln (Q) | Asn; Glu |
| Glu (E) | Asp; Gln |
| Gly (G) | Ala |
| His (H) | Asn; Gln; Lys; Arg |
| Ile (I) | Leu; Val; Met; Ala; Phe; |
| | Norleucine |
| Leu (L) | Norleucine; Ile; Val; Met; Ala; |
| | Phe |
| Lys (K) | Arg; Gln; Asn |
| Met (M) | Leu; Phe; Ile |
| Phe (F) | Trp; Leu; Val; Ile; Ala; Tyr |
| Pro (P) | Ala |
| Ser (S) | Thr |
| Thr (T) | Val; Ser |
| Trp (W) | Tyr; Phe |
| Tyr (Y) | Trp; Phe; Thr; Ser |
| Val (V) | Ile; Leu; Met; Phe; Ala; |
| | Norleucine |

[0390] Amino acids may be grouped according to common side-chain properties:
[0391] (1) hydrophobic: Norleucine, Met, Ala, Val, Leu, Ile;
[0392] (2) neutral hydrophilic: Cys, Ser, Thr, Asn, Gln;
[0393] (3) acidic: Asp, Glu;
[0394] (4) basic: His, Lys, Arg;
[0395] (5) residues that influence chain orientation: Gly, Pro;
[0396] (6) aromatic: Trp, Tyr, Phe.

[0397] Non-conservative substitutions will entail exchanging a member of one of these classes with another class.

[0398] An “amino acid derivative,” as used herein, refers to any amino acid, modified amino acid, and/or amino acid analogue, that is not one of the 20 common natural amino acids found in humans. Exemplary amino acid derivatives include natural amino acids not found in humans (e.g., seleno cysteine and pyrrolysine, which may be found in some microorganisms) and unnatural amino acids. Exemplary amino acid derivatives, include, but are not limited to, amino acid derivatives commercially available through chemical product manufacturers (e.g., sigmaaldrich.com/chemistry/chemistry-products.html?TablePage=16274965, accessed on May 6, 2017, which is incorporated herein by reference). One or more amino acid derivatives may be incorporated into a polypeptide at a specific location using a translation system that utilizes host cells, orthogonal aminoacyl-tRNA synthetases derived from eubacterial synthetases, orthogonal tRNAs, and an amino acid derivative. For further descriptions, see, e.g., U.S. Pat. No. 9,624,485.

[0399] In some embodiments, a polypeptide comprises an amino acid substitution with an amino acid derivative. In some embodiments, the amino acid derivative is an alanine derivative, a cysteine derivative, an aspartic acid derivative, a glutamic acid derivative, a phenylalanine derivative, a glycine derivative, a histidine derivative, an isoleucine derivative, a lysine derivative, a leucine derivative, a methionine derivative, an asparagine derivative, a proline derivative, a glutamine derivative, an arginine derivative, a serine derivative, a threonine derivative, a valine derivative, a tryptophan derivative, or a tyrosine derivative.

[0400] “IL4R,” as used herein, is a polypeptide comprising the entirety or a fragment of IL4 receptor subunit alpha that binds to IL4.

[0401] For example, “IL4R” refers to an IL4R polypeptide from any vertebrate source, including mammals such as primates (e.g., humans and cynomolgus monkeys), rodents (e.g., mice and rats), and companion animals (e.g., dogs, cats, and equine), unless otherwise indicated. The term also includes naturally occurring variants of IL4R, e.g., splice variants or allelic variants, or man-made variants of IL4R, e.g., labeled IL4R polypeptides. In some embodiments, IL4R is an extracellular domain fragment that binds IL4. In some such embodiments, the IL4R may be referred to as an IL4R extracellular domain (ECD). In some embodiments, IL4R comprises the amino acid sequence of SEQ ID NOs: 94, 95, 96, 97, 98, 99, 100, 101, 102, 103, 104, 105, 106, 107, 108, 109, 110, 111, 112, 113, 114, 115, 116, or 117.

[0402] “IL4,” as used herein, is a polypeptide comprising the entirety or a fragment of IL4 that binds to IL4R.

[0403] For example, IL4 refers to a IL4 polypeptide from any vertebrate source, including mammals such as primates (e.g., humans and cynomolgus monkeys), rodents (e.g., mice and rats), and companion animals (e.g., dogs, cats, and equine), unless otherwise indicated. The term also includes naturally occurring variants of IL4, e.g., splice variants or allelic variants, or man-made variants of IL4, e.g., labeled IL4 polypeptides. In some embodiments, IL4 comprises the amino acid sequence of SEQ ID NO: 118, 119, 120, 121, 122, or 123, or a processed version thereof. In some embodiments, IL4 comprises the amino acid sequence of SEQ ID NO: 124, 125, 126, 127, 128, 129, 130, or 131.

[0404] “IL13,” as used herein, is a polypeptide comprising the entirety or a fragment of IL13 that binds to IL4R.

[0405] For example, IL13 refers to a IL13 polypeptide from any vertebrate source, including mammals such as primates (e.g., humans and cynomolgus monkeys), rodents (e.g., mice and rats), and companion animals (e.g., dogs, cats, and equine), unless otherwise indicated. The term also includes naturally occurring variants of IL13, e.g., splice variants or allelic variants, or man-made variants of IL13, e.g., labeled IL13 polypeptides. In some embodiments, IL13 comprises the amino acid sequence of SEQ ID NO: 154 or 155, or a processed version thereof. In some embodiments, IL31 comprises the amino acid sequence of SEQ ID NO: 156, 157, 158, or 159.

[0406] “IL13R” or “IL13Ra1,” as used herein, is a polypeptide comprising the entirety or a fragment of IL13R that pairs with IL4R to bind to IL4 or IL13.

[0407] “Gamma C receptor,” as used herein, is a polypeptide comprising the entirety or a fragment of common gamma chain receptor that pairs with IL4R to bind to IL4.

[0408] The term “IL4R binding domain” of an antibody means the binding domain formed by a light chain and heavy chain of an anti-IL4R antibody, which binds IL4R.

[0409] In some embodiments, the IL4R binding domain binds canine IL4R with greater affinity than it binds human IL4R. In some embodiments, the IL4R binding domain binds feline IL4R.

[0410] “IL4/IL13 signaling function,” as used herein refers to any cellular effect that results when IL4 binds to IL4R paired with IL13R or Gamma C receptor, or when IL13 binds to IL4R paired with IL13R. Cellular effects may include STAT6 phosphorylation, differentiation of T helper cells into Th2 cells, activation of B cell and/or T cell proliferation, and/or induction of B cell class switching to IgE.

[0411] As used herein, the term “epitope” refers to a site on a target molecule (for example, an antigen, such as a protein, nucleic acid, carbohydrate or lipid) to which an antigen-binding molecule (for example, an antibody, antibody fragment, or scaffold protein containing antibody binding regions) binds. Epitopes often include a chemically active surface grouping of molecules such as amino acids, polypeptides or sugar side chains and have specific three-dimensional structural characteristics as well as specific charge characteristics. Epitopes can be formed both from contiguous or juxtaposed noncontiguous residues (for example, amino acids, nucleotides, sugars, lipid moiety) of the target molecule. Epitopes formed from contiguous residues (for example, amino acids, nucleotides, sugars, lipid moiety) typically are retained on exposure to denaturing solvents whereas epitopes formed by tertiary folding typically are lost on treatment with denaturing solvents. An epitope may include but is not limited to at least 3, at least 5 or 8-10 residues (for example, amino acids or nucleotides). In some examples an epitope is less than 20 residues (for example, amino acids or nucleotides) in length, less than 15 residues or less than 12 residues. Two antibodies may bind the same epitope within an antigen if they exhibit competitive binding for the antigen. In some embodiments, an epitope can be identified by a certain minimal distance to a CDR residue on the antigen-binding molecule. In some embodiments, an epitope can be identified by the above distance, and further limited to those residues involved in a bond (for example, a hydrogen bond) between an antibody residue and an antigen residue. An epitope can be identified by various scans as well, for example an alanine or arginine scan can indicate one or more residues that the antigen-binding molecule can interact with. Unless explicitly denoted, a set of residues as an epitope does not exclude other residues from being part of the epitope for a particular antibody. Rather, the presence of such a set designates a minimal series (or set of species) of epitopes. Thus, in some embodiments, a set of residues identified as an epitope designates a minimal epitope of relevance for the antigen, rather than an exclusive list of residues for an epitope on an antigen.

[0412] In some embodiments, the epitope is within L41 and T50 of canine IL4R ECD (SEQ ID NO: 99) or feline IL4R ECD (SEQ ID NO: 100), such as within R36 and N55. For example, the epitope may comprise the amino acid sequence of SEQ ID NO: 88, SEQ ID NO: 89, SEQ ID NO: 91, or SEQ ID NO: 92. In some embodiments, the epitope comprises the amino acid sequence LX₁₀FMGSENX₁₁T, wherein X₁₀ is D or N and X₁₁ is H or R (SEQ ID NO: 85). In some embodiments, the epitope comprises the amino acid sequence RLSYQLX₁₀FMGSENX₁₁TCVPEN, wherein X₁₀ is D or N and X₁₁ is H or R (SEQ ID NO: 86).

[0413] In some embodiments, the epitope is within amino acids S64 and Q85 of canine IL4R ECD (SEQ ID NO: 99) or feline IL4R ECD (SEQ ID NO: 100). For example, the epitope may comprise the amino acid sequence of SEQ ID NO: 90 or SEQ ID NO: 93. In some embodiments, the epitope comprises the amino acid sequence SMX₁₂X₁₃DDX₁₄VEADVYQLX₁₅LWAGXQ, wherein X₁₂ is P or L, X₁₃ is I or M, X₁₄ is A or F, X₁₅ is D or H, and X₁₆ is Q or T (SEQ ID NO: 87).

[0414] In some embodiments, the epitope is within amino acids D65 and N78 of canine IL4R ECD (SEQ ID NO: 99). For example, the epitope may comprise the amino acid sequence of SEQ ID NO: 354.

[0415] In some embodiments, a first epitope is within amino acids G24 and A56 of canine IL4R ECD (SEQ ID NO: 99) and a second epitope is within amino acids R79 and 190 of canine IL4R ECD. For example, the first epitope may comprise the amino acid sequence of SEQ ID NO: 355 and the second epitope may comprise the amino acid sequence of SEQ ID NO: 356.

[0416] In some embodiments, the epitope is within amino acids R79 and V98 of canine IL4R ECD (SEQ ID NO: 99). For example, the epitope may comprise the amino acid sequence of SEQ ID NO: 357.

[0417] The term “CDR” means a complementarity determining region as defined by at least one manner of identification to one of skill in the art. In some embodiments, CDRs can be defined in accordance with any of the Chothia numbering schemes, the Kabat numbering scheme, a combination of Kabat and Chothia, the AbM definition, the contact definition, or a combination of the Kabat, Chothia, AbM, or contact definitions. The various CDRs within an antibody can be designated by their appropriate number and chain type, including, without limitation as CDR-H1, CDR-H2, CDR-HC3, CDR-L1, CDR-L2, and CDR-L3. The term “CDR” is used herein to also encompass a “hypervariable region” or HVR, including hypervariable loops.

[0418] In some embodiments, an anti-IL4R antibody comprises a heavy chain comprising (a) a CDR-H1 comprising the amino acid sequence of SEQ ID NO: 1, SEQ ID NO: 7, or SEQ ID NO: 29; (b) a CDR-H2 comprising the amino acid sequence of SEQ ID NO: 2, SEQ ID NO: 268, SEQ ID NO: 8, SEQ ID NO: 269, SEQ ID NO: 30, SEQ ID NO: 271, or SEQ ID NO: 272; or (c) a CDR-H3 comprising the amino acid sequence of SEQ ID NO: 3, SEQ ID NO: 9, or SEQ ID NO: 31. In some embodiments, an anti-IL4R antibody comprises a light chain comprising (a) a CDR-L1 comprising the amino acid sequence of SEQ ID NO: 4, SEQ ID NO: 14, or SEQ ID NO: 36; (b) a CDR-L2 comprising the amino acid sequence of SEQ ID NO: 5, SEQ ID NO: 15, or SEQ ID NO: 37; or (c) a CDR-L3 comprising the amino acid sequence of SEQ ID NO: 6, SEQ ID NO: 16, or SEQ ID NO: 38.

[0419] In some embodiments, an anti-IL4R antibody comprises a heavy chain comprising (a) a CDR-H1 sequence having at least 85%, at least 90%, at least 95%, or at least 98% sequence identity to the amino acid sequence of SEQ ID NO: 1, SEQ ID NO: 7, or SEQ ID NO: 29; (b) a CDR-H2 sequence having at least 85%, at least 90%, at least 95%, or at least 98% sequence identity to the amino acid sequence of SEQ ID NO: 2, SEQ ID NO: 268, SEQ ID NO: 8, SEQ ID NO: 269, SEQ ID NO: 30, SEQ ID NO: 271, or SEQ ID NO: 272; or (c) a CDR-H3 sequence having at least 85%, at least 90%, at least 95%, or at least 98% sequence identity to the amino acid sequence of SEQ ID NO: 3, SEQ ID NO: 9, or SEQ ID NO: 31. In some embodiments, an anti-IL4R antibody comprises a light chain comprising (a) a CDR-L1 sequence having at least 85%, at least 90%, at least 95%, or at least 98% sequence identity to the amino acid sequence of SEQ ID NO: 4, SEQ ID NO: 14, or SEQ ID NO: 36; (b) a CDR-L2 sequence having at least 85%, at least 90%, at least 95%, or at least 98% sequence identity to the amino acid sequence of SEQ ID NO: 5, SEQ ID NO: 15, or SEQ ID NO: 37; or (c) a CDR-L3 sequence having at least 85%, at least 90%, at least 95%, or at least 98% sequence identity to the amino acid sequence of SEQ ID NO: 6, SEQ ID NO: 16, or SEQ ID NO: 38.

[0420] In some embodiments, an anti-IL4R antibody comprises a heavy chain comprising: a) a CDR-H1 sequence having at least 85%, at least 90%, at least 95%, at least 98%, or 100% sequence identity to the amino acid sequence of SEQ ID NO: 278; b) a CDR-H2 sequence having at least 85%, at least 90%, at least 95%, at least 98%, or 100% sequence identity to the amino acid sequence of SEQ ID NO: 279; and c) a CDR-H3 sequence having at least 85%, at least 90%, at least 95%, at least 98%, or 100% sequence identity to the amino acid sequence of SEQ ID NO: 280. In some embodiments, an anti-IL4R antibody comprises a light chain comprising: a) a CDR-L1 sequence having at least 85%, at least 90%, at least 95%, at least 98%, or 100% sequence identity to the amino acid sequence of SEQ ID NO: 285; b) a CDR-L2 sequence having at least 85%, at least 90%, at least 95%, at least 98%, or 100% sequence identity to the amino acid sequence of SEQ ID NO: 286; and c) a CDR-L3 sequence having at least 85%, at least 90%, at least 95%, at least 98%, or 100% sequence identity to the amino acid sequence of SEQ ID NO: 287.

[0421] In some embodiments, an anti-IL4R antibody comprises a heavy chain comprising: a) a CDR-H1 sequence having at least 85%, at least 90%, at least 95%, at least 98%, or 100% sequence identity to the amino acid sequence of SEQ ID NO: 310; b) a CDR-H2 sequence having at least 85%, at least 90%, at least 95%, at least 98%, or 100% sequence identity to the amino acid sequence of SEQ ID NO: 311; and c) a CDR-H3 sequence having at least 85%, at least 90%, at least 95%, at least 98%, or 100% sequence identity to the amino acid sequence of SEQ ID NO: 312. In some embodiments, an anti-IL4R antibody comprises a light chain comprising: a) a CDR-L1 sequence having at least 85%, at least 90%, at least 95%, at least 98%, or 100% sequence identity to the amino acid sequence of SEQ ID NO: 317; b) a CDR-L2 sequence having at least 85%, at least 90%, at least 95%, at least 98%, or 100% sequence identity to the amino acid sequence of SEQ ID NO: 318; and c) a CDR-L3 sequence having at least 85%, at least 90%, at least 95%, at least 98%, or 100% sequence identity to the amino acid sequence of SEQ ID NO: 319.

[0422] In some embodiments, an anti-IL4R antibody comprises a heavy chain comprising: a) a CDR-H1 sequence having at least 85%, at least 90%, at least 95%, at least 98%, or 100% sequence identity to the amino acid sequence of SEQ ID NO: 326 or SEQ ID NO: 407; b) a CDR-H2 sequence having at least 85%, at least 90%, at least 95%, at least 98%, or 100% sequence identity to the amino acid sequence of SEQ ID NO: 327; and c) a CDR-H3 sequence having at least 85%, at least 90%, at least 95%, at least 98%, or 100% sequence identity to the amino acid sequence of SEQ ID NO: 328. In some embodiments, an anti-IL4R antibody comprises a light chain comprising a) a CDR-L1 sequence having at least 85%, at least 90%, at least 95%, at least 98%, or 100% sequence identity to the amino acid sequence of SEQ ID NO: 333; b) a CDR-L2 sequence having at least 85%, at least 90%, at least 95%, at least 98%, or 100% sequence identity to the amino acid sequence of SEQ ID NO: 334; and c) a CDR-L3 sequence having at least 85%, at least 90%, at least 95%, at least 98%, or 100% sequence identity to the amino acid sequence of SEQ ID NO: 335.

[0423] In some embodiments, an anti-IL4R antibody comprises a heavy chain comprising: a) a CDR-H1 sequence having at least 85%, at least 90%, at least 95%, at least 98%, or 100% sequence identity to the amino acid sequence of SEQ ID NO: 294; b) a CDR-H2 sequence having at least 85%, at least 90%, at least 95%, at least 98%, or 100% sequence identity to the amino acid sequence of SEQ ID NO: 295; and c) a CDR-H3 sequence having at least 85%, at least 90%, at least 95%, at least 98%, or 100% sequence identity to the amino acid sequence of SEQ ID NO: 296. In some embodiments, an anti-IL4R antibody comprises a light chain comprising: a) a CDR-L1 sequence having at least 85%, at least 90%, at least 95%, at least 98%, or 100% sequence identity to the amino acid sequence of SEQ ID NO: 301; b) a CDR-L2 sequence having at least 85%, at least 90%, at least 95%, at least 98%, or 100% sequence identity to the amino acid sequence of SEQ ID NO: 302; and c) a CDR-L3 sequence having at least 85%, at least 90%, at least 95%, at least 98%, or 100% sequence identity to the amino acid sequence of SEQ ID NO: 303.

[0424] The term “variable region” as used herein refers to a region comprising at least three CDRs. In some embodiments, the variable region includes the three CDRs and at least one framework region (“FR”). The terms “heavy chain variable region” or “variable heavy chain” are used interchangeably to refer to a region comprising at least three heavy chain CDRs. The terms “light chain variable region” or “variable light chain” are used interchangeably to refer to a region comprising at least three light chain CDRs. In some embodiments, the variable heavy chain or variable light chain comprises at least one framework region. In some embodiments, an antibody comprises at least one heavy chain framework region selected from HC-FR1, HC-FR2, HC-FR3, and HC-FR4. In some embodiments, an antibody comprises at least one light chain framework region selected from LC-FR1, LC-FR2, LC-FR3, and LC-FR4. The framework regions may be juxtaposed between light chain CDRs or between heavy chain CDRs. For example, an antibody may comprise a variable heavy chain having the following structure: (HC-FR1)-(HC-CDR1)-(HC-FR2)-(HC-CDR2)-(HC-FR3)-(HC-CDR3)-(HC-1-R4). An antibody may comprise a variable heavy chain having the following structure: (HC-CDR1)-(HC-FR2)-(HC-CDR2)-(HC-FR3)-(HC-CDR3). An antibody may also comprise a variable light chain having the following structure: (LC-FR1)-(LC-CDR1)-(LC-FR2)-(LC-CDR2)-(LC-FR3)-(LC-CDR3)-(LC-FR4). An antibody may also comprise a variable light chain having the following structure: (LC-CDR1)-(LC-FR2)-(LC-CDR2)-(LC-FR3)-(LC-CDR3).

[0425] In some embodiments, an anti-IL4R antibody comprises one or more of (a) a variable region heavy chain framework 1 (HC-FR1) sequence of SEQ ID NO: 10 or SEQ ID NO: 32, (b) a HC-FR2 sequence of SEQ ID NO: 11 or SEQ ID NO: 33, (c) a HC-FR3 sequence of SEQ ID NO: 12, SEQ ID NO: 270, SEQ ID NO: 34, SEQ ID NO: 273, (d) a HC-FR4 sequence of SEQ ID NO: 13 or SEQ ID NO: 35, (e) a variable region light chain framework 1 (LC-FR1) sequence of SEQ ID NO: 17 or SEQ ID NO: 39, (f) an LC-FR2 sequence of SEQ ID NO: SEQ ID NO: 18 or SEQ ID NO: 40, (g) an LC-FR3 sequence of SEQ ID NO: 19 or SEQ ID NO: 41, or (h) an LC-FR4 sequence of SEQ ID NO: 20 or SEQ ID NO: 42.

[0426] In some embodiments, an anti-IL4R antibody comprises:
[0427] a. (i) a variable heavy chain sequence having at least 85%, at least 90%, at least 95%, at least 98%, or 100% sequence identity to the amino acid sequence of SEQ ID NO: 21 or SEQ ID NO: 43; (ii) a variable light chain sequence having at least 85%, at least 90%, at least 95%, at least 98%, or 100% sequence identity to the amino acid sequence of SEQ ID NO: 22 or SEQ ID NO: 44; or (iii) a variable heavy chain sequence as in (i) and a variable light chain sequence as in (ii); or
[0428] b. (i) a variable heavy chain sequence having at least 85%, at least 90%, at least 95%, at least 98%, or 100% sequence identity to the amino acid sequence of SEQ ID NO: 59, SEQ ID NO: 60, SEQ ID NO: 63, or SEQ ID NO: 64, SEQ ID NO: 274, or SEQ ID NO: 363; (ii) a variable light chain sequence having at least 85%, at least 90%, at least 95%, at least 98%, or 100% sequence identity to the amino acid sequence of SEQ ID NO: 61, SEQ ID NO: 62, SEQ ID NO: 65, or SEQ ID NO: 66, SEQ ID NO: 275, SEQ ID NO: 364; or (iii) a variable heavy chain sequence as in (i) and a variable light chain sequence as in (ii); or
[0429] c. (i) a variable heavy chain sequence having at least 85%, at least 90%, at least 95%, at least 98%, or 100% sequence identity to the amino acid sequence of SEQ ID NO: 67 or SEQ ID NO: 69; (ii) a variable light chain sequence having at least 85%, at least 90%, at least 95%, at least 98%, or 100% sequence identity to the amino acid sequence of SEQ ID NO: 68 or SEQ ID NO: 70; or (iii) a variable heavy chain sequence as in (i) and a variable light chain sequence as in (ii).

[0430] In some embodiments, an anti-IL4R antibody comprises a variable heavy chain sequence of SEQ ID NO: 21, SEQ ID NO: 43, SEQ ID NO: 59, SEQ ID NO: 60, SEQ ID NO: 63, SEQ ID NO: 64, SEQ ID NO: 274, SEQ ID NO: 363, SEQ ID NO: 67, SEQ ID NO: 69, SEQ ID NO: 365, or SEQ ID NO: 366, and/or a variable light chain sequence of (a) SEQ ID NO: 22, SEQ ID NO: 44, SEQ ID NO: 61, SEQ ID NO: 62, SEQ ID NO: 65, SEQ ID NO: 66, SEQ ID NO: 275, SEQ ID NO: 364, SEQ ID NO: 68, SEQ ID NO: 70, SEQ ID NO: 367, SEQ ID NO: 368, or SEQ ID NO: 369.

[0431] In some embodiments, an anti-IL4R antibody comprises a heavy chain sequence of SEQ ID NO: 25, SEQ ID NO: 47, SEQ ID NO: 51, SEQ ID NO: 53, SEQ ID NO: 55, SEQ ID NO: 71, SEQ ID NO: 72, SEQ ID NO: 73, SEQ ID NO: 74, SEQ ID NO: 79, SEQ ID NO: 80, SEQ ID NO: 82, SEQ ID NO: 372, SEQ ID NO: 373, SEQ ID NO: 83, SEQ ID NO: 374, or SEQ ID NO: 375 and/or a light chain sequence of SEQ ID NO: 26, SEQ ID NO: 48, SEQ ID NO: 52, SEQ ID NO: 54, SEQ ID NO: 56, SEQ ID NO: 73, SEQ ID NO: 74, SEQ ID NO: 77, SEQ ID NO: 78, SEQ ID NO: 277, SEQ ID NO: 371, SEQ ID NO: 81, SEQ ID NO: 84, SEQ ID NO: 376, SEQ ID NO: 377, SEQ ID NO: 378.

[0432] In some embodiments, an anti-IL4R antibody comprises:
[0433] a. (i) a variable heavy chain sequence having at least 85%, at least 90%, at least 95%, at least 98%, or 100% sequence identity to the amino acid sequence of SEQ ID NO: 292; (ii) a variable light chain sequence having at least 85%, at least 90%, at least 95%, at least 98%, or 100% sequence identity to the amino acid sequence of SEQ ID NO: 293; or (iii) a variable heavy chain sequence as in (i) and a variable light chain sequence as in (ii); or
[0434] b. (i) a variable heavy chain sequence having at least 85%, at least 90%, at least 95%, at least 98%, or 100% sequence identity to the amino acid sequence of SEQ ID NO: 342 or SEQ ID NO: 343; (ii) a variable light chain sequence having at least 85%, at least 90%, at least 95%, at least 98%, or 100% sequence identity to the amino acid sequence of SEQ ID NO: 344; or (iii) a variable heavy chain sequence as in (i) and a variable light chain sequence as in (ii).

[0435] In some embodiments, an anti-IL4R antibody comprises:
[0436] a) a variable heavy chain sequence comprising the amino acid sequence of SEQ ID NO: 292, and a variable light chain sequence comprising the amino acid sequence of SEQ ID NO: 293; or
[0437] b) a variable heavy chain sequence comprising the amino acid sequence of SEQ ID NO: 342 or SEQ ID NO: 343, and a variable light chain sequence comprising the amino acid sequence of SEQ ID NO: 344.

[0438] In some embodiments, an anti-IL4R antibody comprises a variable heavy chain sequence of SEQ ID NO: 292, SEQ ID NO: 342, or SEQ ID NO: 343 and/or a variable light chain sequence of (a) SEQ ID NO: 293 or SEQ ID NO: 344.

[0439] In some embodiments, an anti-IL4R antibody comprises a heavy chain sequence of SEQ ID NO: SEQ ID NO: 348 or SEQ ID NO: 349 and/or a light chain sequence of SEQ ID NO: 350.

[0440] In some embodiments, an anti-IL4R antibody comprises: (a) a variable heavy chain sequence having at least 85%, at least 90%, at least 95%, at least 98%, or 100% sequence identity to the amino acid sequence of SEQ ID NO: 324; (b) a variable light chain sequence having at least 85%, at least 90%, at least 95%, at least 98%, or 100% sequence identity to the amino acid sequence of SEQ ID NO: 325; or (c) a variable heavy chain sequence as in (a) and a variable light chain sequence as in (b).

[0441] In some embodiments, an anti-IL4R antibody comprises a variable heavy chain sequence of SEQ ID NO: 324 and/or a variable light chain sequence of (a) SEQ ID NO: 325.

[0442] In some embodiments, an anti-IL4R antibody comprises a heavy chain sequence of SEQ ID NO: SEQ ID NO: 348 or SEQ ID NO: 349 and/or a light chain sequence of SEQ ID NO: 350.

[0443] In some embodiments, an anti-IL4R antibody comprises:
[0444] a. (i) a variable heavy chain sequence having at least 85%, at least 90%, at least 95%, at least 98%, or 100% sequence identity to the amino acid sequence of SEQ ID NO: 340; (ii) a variable light chain sequence having at least 85%, at least 90%, at least 95%, at least 98%, or 100% sequence identity to the amino acid sequence of SEQ ID NO: 341; or (iii) a variable heavy chain sequence as in (i) and a variable light chain sequence as in (ii); or
[0445] b. (i) a variable heavy chain sequence having at least 85%, at least 90%, at least 95%, at least 98%, or 100% sequence identity to the amino acid sequence of SEQ ID NO: 345 or SEQ ID NO: 346; (ii) a variable light chain sequence having at least 85%, at least 90%, at least 95%, at least 98%, or 100% sequence identity to the amino acid sequence of SEQ ID NO: 347 or SEQ ID NO: 408; or (iii) a variable heavy chain sequence as in (i) and a variable light chain sequence as in (ii).

[0446] In some embodiments, an anti-IL4R antibody comprises a variable heavy chain sequence of SEQ ID NO: 340, SEQ ID NO: 345, or SEQ ID NO: 346 and/or a variable light chain sequence of (a) SEQ ID NO: 341, SEQ ID NO: 347, or SEQ ID NO: 408.

[0447] In some embodiments, an anti-IL4R antibody comprises a heavy chain sequence of SEQ ID NO: SEQ ID NO: 348 or SEQ ID NO: 349 and/or a light chain sequence of SEQ ID NO: 350.

[0448] In some embodiments, an anti-IL4R antibody comprises: The isolated antibody of any one of claims 75 to 85, wherein the antibody comprises: (a) a variable heavy chain sequence having at least 85%, at least 90%, at least 95%, at least 98%, or 100% sequence identity to the amino acid sequence of SEQ ID NO: 308; (b) a variable light chain sequence having at least 85%, at least 90%, at least 95%, at least 98%, or 100% sequence identity to the amino acid sequence of SEQ ID NO: 309; or (c) a variable heavy chain sequence as in (a) and a variable light chain sequence as in (b).

[0449] In some embodiments, an anti-IL4R antibody comprises a variable heavy chain sequence of SEQ ID NO: 308 and/or a variable light chain sequence of (a) SEQ ID NO: 341 or SEQ ID NO: 309.

[0450] The term “constant region” as used herein refers to a region comprising at least three constant domains. The terms “heavy chain constant region” or “constant heavy chain” are used interchangeably to refer to a region comprising at least three heavy chain constant domains, CH1, CH2, and CH3. Nonlimiting exemplary heavy chain constant regions include γ, δ, α, ε, and μ. Each heavy chain constant region corresponds to an antibody isotype. For example, an antibody comprising a γ constant region is an IgG antibody, an antibody comprising a δ constant region is an IgD antibody, an antibody comprising an α constant region is an IgA antibody, an antibody comprising a μ constant region is an IgM antibody, and an antibody comprising an ε constant region is an IgE antibody. Certain isotypes can be further subdivided into subclasses. For example, IgG antibodies include, but are not limited to, IgG1 (comprising a γ₁ constant region), IgG2 (comprising a γ₂ constant region), IgG3 (comprising a γ₃ constant region), and IgG4 (comprising a γ₄ constant region) antibodies; IgA antibodies include, but are not limited to, IgA1 (comprising an α₁ constant region) and IgA2 (comprising an α₂ constant region) antibodies; and IgM antibodies include, but are not limited to IgM1 and IgM2. The terms “light chain constant region” or “constant light chain” are used interchangeably to refer to a region comprising a light chain constant domain, CL. Nonlimiting exemplary light chain constant regions include λ and κ (e.g., SEQ ID NO: 235 or 241). Non-function-altering deletions and alterations within the domains are encompassed within the scope of the term “constant region” unless designated otherwise. Canine, feline, and equine have antibody classes such as IgG, IgA, IgD, IgE, and IgM. Within the canine IgG antibody class are IgG-A, IgG-B, IgG-C, and IgG-D. Within the feline IgG antibody class are IgG1a, IgG1b, and IgG2. Within the equine IgG antibody class are IgG1, IgG2, IgG3, IgG4, IgG5, IgG6, and IgG7.

[0451] A “fragment crystallizable polypeptide” or “Fc polypeptide” is the portion of an antibody molecule that interacts with effector molecules and cells. It comprises the C-terminal portions of the immunoglobulin heavy chains. As used herein, an Fc polypeptide includes fragments of the Fc domain having one or more biological activities of an entire Fc polypeptide. In some embodiments, a biological activity of an Fc polypeptide is the ability to bind FcRn. In some embodiments, a biological activity of an Fc polypeptide is the ability to bind C1q. In some embodiments, a biological activity of an Fc polypeptide is the ability to bind CD16. In some embodiments, a biological activity of an Fc polypeptide is the ability to bind protein A. An “effector function” of the Fc polypeptide is an action or activity performed in whole or in part by any antibody in response to a stimulus and may include complement fixation and/or ADCC (antibody-dependent cellular cytotoxicity) induction.

[0452] The term “IgX Fc” means the Fc region is derived from a particular antibody isotype (e.g., IgG, IgA, IgD, IgE, IgM, etc.), where “X” denotes the antibody isotype. Thus, “IgG Fc” denotes the Fc region of a γ chain, “IgA Fc” denotes the Fc region of an α chain, “IgD Fc” denotes the Fc region of a δ chain, “IgE Fc” denotes the Fc region of an ε chain, “IgM Fc” denotes the Fc region of a μ chain, etc. In some embodiments, the IgG Fc region comprises CH1, hinge, CH2, CH3, and CL1. “IgX-N-Fc” denotes that the Fc region is derived from a particular subclass of antibody isotype (such as canine IgG subclass A, B, C, or D; feline IgG subclass 1, 2a, or 2b; or equine IgG subclass IgG1, IgG2, IgG3, IgG4, IgG5, IgG6, or IgG7, etc.), where “N” denotes the subclass.

[0453] In some embodiments, an IgX Fc polypeptide or IgX-N-Fc polypeptide is derived from a companion animal, such as a dog, a cat, or a horse. In some embodiments, IgG Fc polypeptides are isolated from canine γ heavy chains, such as IgG-A, IgG-B, IgG-C, or IgG-D. In some instances, IgG Fc polypeptides are isolated from feline γ heavy chains, such as IgG1, IgG2a, or IgG2b. In other instances, IgG Fc polypeptides are isolated from equine γ heavy chains, such as IgG1, IgG2, IgG3, IgG4, IgG5, IgG6, or IgG7.

[0454] The terms “IgX Fc” and “IgX Fc polypeptide” include wild-type IgX Fc polypeptides and variant IgX Fc polypeptides, unless indicated otherwise.

[0455] “Wild-type” refers to a non-mutated version of a polypeptide that occurs in nature, or a fragment thereof. A wild-type polypeptide may be produced recombinantly.

[0456] In some embodiments, a wild-type IgG Fc polypeptide comprises the amino acid sequence of SEQ ID NO: 162, SEQ ID NO: 163, SEQ ID NO: 164, SEQ ID NO: 165, SEQ ID NO: 166, SEQ ID NO: 167, SEQ ID NO: 203, SEQ ID NO: 204, SEQ ID NO: 205, SEQ ID NO: 206, SEQ ID NO: 207, SEQ ID NO: 247, SEQ ID NO: 248, SEQ ID NO: 249, SEQ ID NO: 250, SEQ ID NO: 251, SEQ ID NO: 252, or SEQ ID NO: 253.

[0457] A “variant” is a polypeptide that differs from a reference polypeptide by single or multiple non-native amino acid substitutions, deletions, and/or additions. In some embodiments, a variant retains at least one biological activity of the reference polypeptide (e.g., wild-type polypeptide).

[0458] A “variant IgG Fc polypeptide” as used herein is an IgG Fc polypeptide that differs from a reference IgG Fc polypeptide by single or multiple amino acid substitutions, deletions, and/or additions and substantially retains at least one biological activity of the reference IgG Fc polypeptide.

[0459] In some embodiments, a variant IgG Fc polypeptide comprises a variant IgG Fc polypeptide of a companion animal species. In some embodiments, a variant IgG Fc polypeptide comprises a variant canine IgG Fc polypeptide, a variant equine IgG Fc polypeptide, or a feline IgG Fc polypeptide. In some embodiments, a variant IgG Fc polypeptide (e.g., a variant canine IgG-A Fc polypeptide, a variant canine IgG-C Fc polypeptide, a variant canine IgG-D Fc polypeptide, variant feline IgG1a Fc polypeptide, variant feline IgG1b Fc polypeptide, or variant feline IgG2 Fc polypeptide) has an activity that the reference (e.g., wild-type) polypeptide substantially lacks. For example, in some embodiments, a variant canine IgG-A Fc polypeptide, a variant canine IgG-C Fc polypeptide, or a variant canine IgG-D Fc polypeptide binds Protein A.

[0460] In some embodiments, a variant IgG Fc polypeptide has modified Protein A binding affinity. In some embodiments, a variant IgG Fc polypeptide has increased binding affinity to Protein A. In some embodiments, a variant IgG Fc polypeptide may be purified using Protein A column chromatography. In some embodiments, a variant IgG Fc polypeptide has modified CD16 binding affinity. In some embodiments, a variant IgG Fc polypeptide has decreased binding affinity to CD16. In some embodiments, a variant IgG Fc may have a reduced ADCC immune response. In some embodiments, a variant IgG Fc polypeptide has modified C1q binding affinity. In some embodiments, a variant IgG Fc polypeptide has reduced binding affinity to C1q. In some embodiments, a variant IgG Fc polypeptide may have reduced complement fixation. In some embodiments, a variant IgG Fc may have a reduced complement-mediated immune response. In some embodiments, a variant IgG Fc polypeptide has modified FcRn binding affinity. In some embodiments, a variant IgG Fc polypeptide has increased binding affinity to FcRn.

[0461] “Hinge” refers to any portion of an Fc polypeptide or variant Fc polypeptide that is proline-rich, comprises at least one cysteine residue, and is located between CH1 and CH2 of a heavy chain constant region.

[0462] In some embodiments, a hinge is capable of forming a disulfide linkage within the same hinge region, within the same Fc polypeptide, with a hinge region of a separate Fc polypeptide, or with a separate Fc polypeptide. In some embodiments, a hinge comprises at least one, at least two, at least three, at least four, at least five, at least six, at least seven, at least eight, at least nine, or at least ten proline residues.

[0463] In some embodiments, a variant feline IgG Fc polypeptide has at least one additional inter-chain disulfide linkage relative to the wild-type feline IgG Fc polypeptide, such as in the hinge region. In some embodiments, a variant feline IgG2 Fc polypeptide with at least one additional inter-chain disulfide linkage has increased inter-chain stability relative to the wild-type feline IgG Fc polypeptide. In some embodiments, a variant IgG polypeptide has at least one amino acid modification to a hinge region relative to a wild-type IgG Fc polypeptide, such as a wild-type feline IgG Fc polypeptide.

[0464] In some embodiments, a variant IgG Fc polypeptide comprises a hinge region or a portion of a hinge region from an IgG Fc polypeptide of a different isotype. In some embodiments, the variant IgG Fc polypeptide, such as a canine IgG2 Fc polypeptide, comprises a hinge region from a wild-type feline IgG1a or IgG1b Fc polypeptide. In some embodiments, a variant IgG Fc polypeptide has increased recombinant production and/or increased hinge disulfide formation relative to the wild-type IgG Fc polypeptide. In some embodiments, the increased recombinant production and/or increased hinge disulfide formation can be determined by SDS-PAGE analysis under reducing and/or non-reducing conditions.

[0465] In some embodiments, a variant IgG Fc polypeptide comprises: a) at least one amino acid substitution at a position corresponding to position 21, 23, 25, 80, 205, and/or 207 of SEQ ID NO: 162; b) at least one amino acid substitution at a position corresponding to position 5, 38, 39, 94, 97, and/or 98 of SEQ ID NO: 163; c) at least one amino acid substitution at a position corresponding to position 5, 21, 23, 24, 38, 39, 93, 97, and/or 98 of SEQ ID NO: 165; d) at least one amino acid substitution at a position corresponding to position 21, 23, 25, 80, and/or 207 of SEQ ID NO: 167; e) at least one amino acid substitution at a position corresponding to position 16 and/or 198 of SEQ ID NO: 203, SEQ ID NO: 204, SEQ ID NO: 205, or SEQ ID NO: 206; and/or f) at least one amino acid substitution at a position corresponding to position 14 and/or 16 of SEQ ID NO: 207.

[0466] In some embodiments, a variant IgG Fc polypeptide comprises: a) at least one amino acid substitution at position 21, 23, 25, 80, 205, and/or 207 of SEQ ID NO: 162; b) at least one amino acid substitution at position 5, 38, 39, 94, 97, and/or 98 of SEQ ID NO: 163; c) at least one amino acid substitution at position 5, 21, 23, 24, 38, 39, 93, 97, and/or 98 of SEQ ID NO: 164; d) at least one amino acid substitution at position 21, 23, 25, 80, and/or 207 of SEQ ID NO: 165; e) at least one amino acid substitution at position 16 and/or 198 of SEQ ID NO: 203, SEQ ID NO: 204, SEQ ID NO: 205, or SEQ ID NO: 206; and/or f) at least one amino acid substitution at position 14 and/or 16 of SEQ ID NO: 207.

[0467] In some embodiments, a variant IgG Fc polypeptide comprises:
[0468] a) a threonine at a position corresponding to position 21, a leucine at a position corresponding to position 23, an alanine at a position corresponding to position 25, a glycine at a position corresponding to position 80, an alanine at a position corresponding to position 205, and/or a histidine at a position corresponding to position 207 of SEQ ID NO: 162;
[0469] b) a proline at a position corresponding to position 5, a glycine at a position corresponding to position 38, an arginine at a position corresponding to position 39, an arginine at a position corresponding to position 93, an isoleucine at a position corresponding to position 97, and/or a glycine at a position corresponding to position 98 of SEQ ID NO: 163;
[0470] c) a proline at a position corresponding to position 5, a threonine at a position corresponding to position 21, a leucine at a position corresponding to position 23, an isoleucine at a position corresponding to position 24, a glycine at a position corresponding to position 38, an arginine at a position corresponding to position 39, an arginine at a position corresponding to position 93, an isoleucine at a position corresponding to position 97, and/or a glycine at a position corresponding to position 98 of SEQ ID NO: 164;
[0471] d) a threonine at a position corresponding to position 21, a leucine at a position corresponding to position 23, an alanine at a position corresponding to position 25, a glycine at a position corresponding to position 80, and/or a histidine at a position corresponding to position 207 of SEQ ID NO: 165;
[0472] e) a proline at a position corresponding to position 16 and/or an alanine at a position corresponding to position 198 of SEQ ID NO: 203, SEQ ID NO: 204, SEQ ID NO: 205, or SEQ ID NO: 206; and/or
[0473] f) a cysteine at a position corresponding to position 14 and/or a proline at a position corresponding to position 16 of SEQ ID NO: 207.

[0474] In some embodiments, a variant IgG Fc polypeptide comprises:
[0475] a) a threonine at position 21, a leucine at position 23, an alanine at position 25, a glycine at position 80, an alanine at position 205, and/or a histidine at position 207 of SEQ ID NO: 162;
[0476] b) a proline at position 5, a glycine at position 38, an arginine at position 39, an arginine at position 93, an isoleucine at position 97, and/or a glycine at position 98 of SEQ ID NO: 163;
[0477] c) a proline at position 5, a threonine at position 21, a leucine at position 23, an isoleucine at position 24, a glycine at position 38, an arginine at position 39, an arginine at position 93, an isoleucine at position 97, and/or a glycine at position 98 of SEQ ID NO: 164;
[0478] d) a threonine at position 21, a leucine at position 23, an alanine at position 25, a glycine at position 80, and/or a histidine at position 207 of SEQ ID NO: 165;
[0479] e) a proline at position 16 and/or an alanine at position 198 of SEQ ID NO: 203, SEQ ID NO: 204, SEQ ID NO: 205, or SEQ ID NO: 206; and/or
[0480] f) a cysteine at position 14 and/or a proline at position 16 of SEQ ID NO: 207.

[0481] In some embodiments, a variant IgG Fc polypeptide comprises the amino acid sequence of SEQ ID NO: 168, 169, 170, 171, 172, 173, 174, 175, 176, 177, 178, 179, 180, 181, 182, 183, 184, 185, 186, 187, 188, 189, 190, 191, 192, 193, 194, 208, 209, 210, 211, 212, 213, 214, 215, 216, 381, 382, 383, 384, 385, 386, 387, 388, 389, 390, 391, 392, 393, or 394.

[0482] A bispecific antibody has a binding specificity for two different epitopes or target molecules. In some embodiments, a bispecific antibody binds two different epitopes of the same target molecule. Bispecific antibodies may be full length antibodies or antibody fragments.

[0483] In some embodiments, an antibody comprises a first variant IgG Fc polypeptide comprising a “knob” mutation and a second variant IgG Fc polypeptide comprising a “hole” mutation. Nonlimiting exemplary knob and hole mutations are described, for example, in Merchant, A. M. et al. An efficient route to human bispecific IgG. Nat Biotechnol, 16(7):677-81 (1998).

[0484] In some embodiments, a variant IgG Fc polypeptide comprises a knob mutation. In some embodiments, a variant IgG Fc polypeptide comprises an amino acid substitution at a position corresponding to position 138 of SEQ ID NO: 162; position 137 of SEQ ID NO: 163, position 137 of SEQ ID NO: 165; position 138 of SEQ ID NO: 167; position 154 of SEQ ID NO: 203, SEQ ID NO: 204, SEQ ID NO: 205, SEQ ID NO: 206, or SEQ ID NO: 207; or position 130 of SEQ ID NO: 247, SEQ ID NO: 248, SEQ ID NO: 249, SEQ ID NO: 250, SEQ ID NO: 251, SEQ ID NO: 252, or SEQ ID NO: 253. In some embodiments, a variant IgG Fc polypeptide comprises an amino acid substitution at position 138 of SEQ ID NO: 162; position 137 of SEQ ID NO: 163; position 137 of SEQ ID NO: 165; position 138 of SEQ ID NO: 167; position 154 of SEQ ID NO: 203, SEQ ID NO: 204, SEQ ID NO: 205, SEQ ID NO: 206, or SEQ ID NO: 207; or position 130 of SEQ ID NO: 247, SEQ ID NO: 248, SEQ ID NO: 249, SEQ ID NO: 250, SEQ ID NO: 251, SEQ ID NO: 252, or SEQ ID NO: 253. In some embodiments, a variant IgG Fc polypeptide comprises a tryptophan at a position corresponding to position 138 of SEQ ID NO: 162; position 137 of SEQ ID NO: 163; position 137 of SEQ ID NO: 165; position 138 of SEQ ID NO: 167, or position 154 of SEQ ID NO: 203, SEQ ID NO: 204, SEQ ID NO: 205, SEQ ID NO: 206, or SEQ ID NO: 207; or position 130 of SEQ ID NO: 247, SEQ ID NO: 248, SEQ ID NO: 249, SEQ ID NO: 250, SEQ ID NO: 251, SEQ ID NO: 252, or SEQ ID NO: 253. In some embodiments, a variant IgG Fc polypeptide comprises a tryptophan at position 138 of SEQ ID NO: 162; position 137 of SEQ ID NO: 163; position 137 of SEQ ID NO: 165; position 138 of SEQ ID NO: 167; position 154 of SEQ ID NO: 203, SEQ ID NO: 204, SEQ ID NO: 205, SEQ ID NO: 206, or SEQ ID NO: 207; or position 130 of SEQ ID NO: 247, SEQ ID NO: 248, SEQ ID NO: 249, SEQ ID NO: 250, SEQ ID NO: 251, SEQ ID NO: 252, or SEQ ID NO: 253. In some embodiments, a variant IgG Fc polypeptide comprises the amino acid sequence of SEQ ID NO: 195, 196, 197, 198, 217, 218, 219, 220, 221, 254, 255, 256, 257, 258, 259, or 260.

[0485] In some embodiments, a variant IgG Fc polypeptide comprises a hole mutation. In some embodiments, a variant IgG Fc polypeptide comprises an amino acid substitution at a position corresponding to position 138 and/or position 140 of SEQ ID NO: 162; position 137 and/or position 139 of SEQ ID NO: 163; position 137 and/or position 139 of SEQ ID NO: 165; position 138 and/or position 140 of SEQ ID NO: 167; position 154 and/or position 156 of SEQ ID NO: 203, SEQ ID NO: 204, SEQ ID NO: 205, SEQ ID NO: 206, or SEQ ID NO: 207; and/or position 130 and/or position 132 of SEQ ID NO: 247, SEQ ID NO: 248, SEQ ID NO: 249, SEQ ID NO: 250, SEQ ID NO: 251, SEQ ID NO: 252, or SEQ ID NO: 253. In some embodiments, a variant IgG Fc polypeptide comprises an amino acid substitution at position 138 and/or position 140 of SEQ ID NO: 162; position 137 and/or position 139 of SEQ ID NO: 163; position 137 and/or position 139 of SEQ ID NO: 165; position 138 and/or position 140 of SEQ ID NO: 167; position 154 and/or position 156 of SEQ ID NO: 203, SEQ ID NO: 204, SEQ ID NO: 205, SEQ ID NO: 206, or SEQ ID NO: 207; or position 130 and/or position 132 of SEQ ID NO: 247, SEQ ID NO: 248, SEQ ID NO: 249, SEQ ID NO: 250, SEQ ID NO: 251, SEQ ID NO: 252, or SEQ ID NO: 253. In some embodiments, a variant IgG Fc polypeptide comprises a serine at a position corresponding to position 138 and/or an alanine at a position corresponding to position 140 of SEQ ID NO: 162; a serine at a position corresponding to position 137 and/or an alanine at a position corresponding to position 139 of SEQ ID NO: 163; a serine at a position corresponding to position 137 and/or an alanine at a position corresponding to position 139 of SEQ ID NO: 165; a serine at a position corresponding to position 138 and/or an alanine at a position corresponding to position 140 of SEQ ID NO: 167; a serine at a position corresponding to position 154 and/or an alanine at a position corresponding to position 156 of SEQ ID NO: 203, SEQ ID NO: 204, SEQ ID NO: 205, SEQ ID NO: 206, or SEQ ID NO: 207; or a serine at a position corresponding to position 130 and/or an alanine at a position corresponding to position 132 of SEQ ID NO: 247, SEQ ID NO: 248, SEQ ID NO: 249, SEQ ID NO: 250, SEQ ID NO: 251, SEQ ID NO: 252, or SEQ ID NO: 253. In some embodiments, a variant IgG Fc polypeptide comprises a serine at position 138 and/or an alanine at position 140 of SEQ ID NO: 162; a serine at position 137 and/or an alanine at position 139 of SEQ ID NO: 163; a serine at position 137 and/or an alanine at position 139 of SEQ ID NO: 165; a serine at position 138 and/or an alanine at position 140 of SEQ ID NO: 167; a serine at position 154 and/or an alanine at position 156 of SEQ ID NO: 203, SEQ ID NO: 204, SEQ ID NO: 205, SEQ ID NO: 206, or SEQ ID NO: 207; or a serine at position 130 and/or an alanine at position 132 of SEQ ID NO: 247, SEQ ID NO: 248, SEQ ID NO: 249, SEQ ID NO: 250, SEQ ID NO: 251, SEQ ID NO: 252, or SEQ ID NO: 253. In some embodiments, a variant IgG Fc polypeptide comprises the amino acid sequence of SEQ ID NO: 199, 200, 201, 202, 222, 223, 224, 225, 226, 261, 262, 263, 264, 265, 266, or 267.

[0486] Furthermore, to facilitate a heavy chain to specifically pair with its intended light chain, interface amino acids between CH1 and the light chain may be mutated to be complementary in shape and charge-charge interaction.

[0487] In some embodiments, a variant IgG Fc polypeptide comprises a CH1 region comprising at least one amino acid substitution at a position corresponding to position 24 and/or position 30 of SEQ ID NO: 227, SEQ ID NO: 228, SEQ ID NO: 229, SEQ ID NO: 230, or SEQ ID NO: 237; or at least one amino acid substitution at a position corresponding to position 24 and/or position 29 of SEQ ID NO: 238. In some embodiments, a variant IgG Fc polypeptide comprises a CH1 region comprising at least one amino acid substitution at position 24 and/or position 30 of SEQ ID NO: 227, SEQ ID NO: 228, SEQ ID NO: 229, SEQ ID NO: 230, or SEQ ID NO: 237; or at least one amino acid substitution at position 24 and/or position 29 of SEQ ID NO: 238. In some embodiments, a variant IgG Fc polypeptide comprises a CH1 region comprising a leucine at a position corresponding to position 24 and/or an asparagine at a position corresponding to position 30 of SEQ ID NO: 227, SEQ ID NO: 228, SEQ ID NO: 229, SEQ ID NO: 230, or SEQ ID NO: 237; or a leucine at a position corresponding to position 24 and/or an asparagine at a position corresponding to position 29 of SEQ ID NO: 238. In some embodiments, a variant IgG Fc polypeptide comprises a CH1 region comprising a leucine at position 24 and/or an asparagine at position 30 of SEQ ID NO: 227, SEQ ID NO: 228, SEQ ID NO: 229, SEQ ID NO: 230, or SEQ ID NO: 237; or a leucine at position 24 and/or an asparagine at position 29 of SEQ ID NO: 238. In some embodiments, a variant IgG Fc polypeptide comprises a CH1 region comprising the amino acid sequence of SEQ ID NO: 231, 232, 233, 234, 239, or 240.

[0488] In some embodiments, a complementary variant light chain constant region comprises at least one amino acid substitution at a position corresponding to position 11 and/or position 22 of SEQ ID NO: 235 or SEQ ID NO: 241. In some embodiments, a variant light chain constant region comprises at least one amino acid substitution at position 11 and/or position 22 of SEQ ID NO: 235 or SEQ ID NO: 241. In some embodiments, a variant light chain constant region comprises an alanine at a position corresponding to position 11 and/or an arginine at a position corresponding to position 22 of SEQ ID NO: 235 or SEQ ID NO: 241. In some embodiments, a variant light chain constant region comprises an alanine at position 11 and/or an arginine at position 22 of SEQ ID NO: 235 or SEQ ID NO: 241. In some embodiments, a variant light chain constant region comprises the amino acid sequence of SEQ ID NO: 236 or 242.

[0489] The term “chimeric antibody” or “chimeric” refers to an antibody in which a portion of the heavy chain or light chain is derived from a particular source or species, while at least a part of the remainder of the heavy chain or light chain is derived from a different source or species. In some embodiments, a chimeric antibody refers to an antibody comprising at least one variable region from a first species (such as mouse, rat, cynomolgus monkey, etc.) and at least one constant region from a second species (such as human, dog, cat, equine, etc.). In some embodiments, a chimeric antibody comprises at least one mouse variable region and at least one canine constant region. In some embodiments, a chimeric antibody comprises at least one mouse variable region and at least one feline constant region. In some embodiments, all of the variable regions of a chimeric antibody are from a first species and all of the constant regions of the chimeric antibody are from a second species. In some embodiments, a chimeric antibody comprises a constant heavy chain region or constant light chain region from a companion animal. In some embodiments, a chimeric antibody comprises a mouse variable heavy and light chains and a companion animal constant heavy and light chains. For example, a chimeric antibody may comprise a mouse variable heavy and light chains and a canine constant heavy and light chains; a chimeric antibody may comprise a mouse variable heavy and light chains and a feline constant heavy and light chains; or a chimeric antibody may comprise a mouse variable heavy and light chains and an equine constant heavy and light chains.

[0490] A “canine chimeric” or “canine chimeric antibody” refers to a chimeric antibody having at least a portion of a heavy chain or a portion of a light chain derived from a dog. A “feline chimeric” or “feline chimeric antibody” refers to a chimeric antibody having at least a portion of a heavy chain or a portion of a light chain derived from a cat. In some embodiments, a canine chimeric antibody comprises a mouse variable heavy and light chains and a canine constant heavy and light chains. In some embodiments, a feline chimeric antibody comprises a mouse variable heavy and light chains and a feline constant heavy and light chains. In some embodiments, the antibody is a chimeric antibody comprising murine variable heavy chain framework regions or murine variable light chain framework regions.

[0491] In some embodiments, an anti-IL4R antibody comprises a chimeric antibody comprising: (i) a heavy chain amino acid sequence of SEQ ID NO: 51 or SEQ ID NO: 55; (ii) a light chain amino acid sequence of SEQ ID NO: 52 or SEQ ID NO: 56; or (iii) a heavy chain amino acid sequence as in (i) and a light chain sequence as in (ii).

[0492] A “canine antibody,” as used herein, encompasses antibodies produced in a canine; antibodies produced in non-canine animals that comprise canine immunoglobulin genes or comprise canine immunoglobulin peptides; or antibodies selected using in vitro methods, such as phage display, wherein the antibody repertoire is based on a canine immunoglobulin sequence. The term “canine antibody” denotes the genus of sequences that are canine sequences. Thus, the term is not designating the process by which the antibody was created, but the genus of sequences that are relevant.

[0493] A “caninized antibody” means an antibody in which at least one amino acid in a portion of a non-canine variable region has been replaced with the corresponding amino acid from a canine variable region. In some embodiments, a caninized antibody comprises at least one canine constant region (e.g., a γ constant region, an a constant region, a δ constant region, an ε constant region, a μ constant region, or etc.) or fragment thereof. In some embodiments, a caninized antibody is an antibody fragment, such as Fab, scFv, (Fab′)₂, etc. The term “caninized” also denotes forms of non-canine (for example, murine) antibodies that are chimeric immunoglobulins, immunoglobulin chains, or fragments thereof (such as Fv, Fab, Fab′, F(ab′)₂ or other antigen-binding sequences of antibodies) that contain minimal sequence of non-canine immunoglobulin. Caninized antibodies can include canine immunoglobulins (recipient antibody) in which residues from a CDR of the recipient are substituted by residues from a CDR of a non-canine species (donor antibody) such as mouse, rat, or rabbit having the desired specificity, affinity, and capacity. In some instances, Fv framework region (FR) residues of the canine immunoglobulin are replaced by corresponding non-canine residues. Furthermore, the caninized antibody can comprise residues that are found neither in the recipient antibody nor in the imported CDR or framework sequences, but are included to further refine and optimize antibody performance.

[0494] In some embodiments, at least one amino acid residue in a portion of a mouse variable heavy chain or a mouse variable light chain has been replaced with the corresponding amino acid from a canine variable region. In some embodiments, the modified chain is fused to a canine constant heavy chain or a canine constant light chain. In some embodiments, an anti-IL4R antibody is a caninized antibody comprising a variable heavy chain amino acid sequence of SEQ ID NO: 59, 60, 63, or 64 and/or a variable light chain amino acid sequence of SEQ ID NO: 61, 62, 65, or 66.

[0495] In some embodiments, an anti-IL4R antibody comprises a canine heavy chain constant region selected from an IgG-A, IgG-B, IgG-C, and IgG-D constant region. In some embodiments, an anti-IL4R antibody comprises is a wild-type or variant canine IgG-A, IgG-B, IgG-C, or IgG-D Fc polypeptide, as described herein. In some embodiments, an anti-IL4R antibody comprises a canine IgG-A Fc polypeptide comprising the amino acid sequence of SEQ ID NO: 162; a canine IgG-B Fc polypeptide comprising the amino acid sequence of SEQ ID NO: 163 or 164; (c) a canine IgG-C Fc polypeptide comprising the amino acid sequence of SEQ ID NO: 165 or 166; or (d) a canine IgG-D Fc polypeptide comprising the amino acid sequence of SEQ ID NO: 167. In some embodiments, an anti-IL4R antibody comprises a variant canine IgG-A Fc polypeptide comprising the amino acid sequence of SEQ ID NO: 168, 169, 195, 199, 383, 384; a variant canine IgG-B Fc polypeptide comprising the amino acid sequence of SEQ ID NO: 170, 171, 172, 173, 174, 175, 176, 177, 178, 179, 196, 200, 381, 382, 387, 388, 389, 390, 391, 392, 393, or 394; (c) a variant canine IgG-C Fc polypeptide comprising the amino acid sequence of SEQ ID NO: 180, 181, 182, 183, 184, 185, 186, 187, 188, 189, 190, 191, 192, 197, or 201; or (d) a variant canine IgG-D Fc polypeptide comprising the amino acid sequence of SEQ ID NO: 194, 198, 202, 385, or 386.

[0496] In some embodiments, an anti-IL4R antibody comprises a canine light chain constant region, such as a canine κ light constant region. In some embodiments, an anti-IL4R antibody comprises is a wild-type canine κ light constant region (e.g., SEQ ID NO: 235) or variant canine κ light constant region (e.g., SEQ ID NO: 236).

[0497] In some embodiments, an anti-IL4R antibody comprises a caninized variable heavy chain of Clone B, Clone I, M3, M5, M8, or M9 and a variant canine IgG Fc polypeptide, such as SEQ ID NO: 71, 72, 75, 76, 276, 370, 348, 349, 351, 352, 395, 396, 397, 398, 399, 400, 401, 402, 403, 404, 405, 406, 410, 411, 412, 413, 414, 415, 416, 417, 418, 419, 420, or 421. In some embodiments, an anti-IL4R antibody comprises a caninized variable light chain of Clone B, Clone I, M3, M5, M8, or M9 and a wild-type canine κ light chain constant region, such as SEQ ID NO: 73, 74, 77, 78, 277, 371, 350, or 352.

[0498] A “feline antibody,” as used herein, encompasses antibodies produced in a feline; antibodies produced in non-feline animals that comprise feline immunoglobulin genes or comprise feline immunoglobulin peptides; or antibodies selected using in vitro methods, such as phage display, wherein the antibody repertoire is based on a feline immunoglobulin sequence. The term “feline antibody” denotes the genus of sequences that are feline sequences. Thus, the term is not designating the process by which the antibody was created, but the genus of sequences that are relevant.

[0499] A “felinized antibody” means an antibody in which at least one amino acid in a portion of a non-feline variable region has been replaced with the corresponding amino acid from a feline variable region. In some embodiments, a felinized antibody comprises at least one feline constant region (e.g., a γ constant region, an a constant region, a δ constant region, an ε constant region, a μ constant region, or etc.) or fragment thereof. In some embodiments, a felinized antibody is an antibody fragment, such as Fab, scFv, (Fab′)₂, etc. The term “felinized” also denotes forms of non-feline (for example, murine) antibodies that are chimeric immunoglobulins, immunoglobulin chains, or fragments thereof (such as Fv, Fab, Fab′, F(ab′)₂ or other antigen-binding sequences of antibodies) that contain minimal sequence of non-feline immunoglobulin. Felinized antibodies can include feline immunoglobulins (recipient antibody) in which residues from a CDR of the recipient are substituted by residues from a CDR of a non-feline species (donor antibody) such as mouse, rat, or rabbit having the desired specificity, affinity, and capacity. In some instances, Fv framework region (FR) residues of the feline immunoglobulin are replaced by corresponding non-feline residues. Furthermore, the felinized antibody can comprise residues that are found neither in the recipient antibody nor in the imported CDR or framework sequences, but are included to further refine and optimize antibody performance.

[0500] In some embodiments, at least one amino acid residue in a portion of a mouse variable heavy chain or a mouse variable light chain has been replaced with the corresponding amino acid from a feline variable region. In some embodiments, the modified chain is fused to a feline constant heavy chain or a feline constant light chain. In some embodiments, an anti-IL4R antibody is a felinized antibody comprising a variable heavy chain amino acid sequence of SEQ ID NO: 67, or SEQ ID NO: 69, SEQ ID NO: 365, or SEQ ID NO: 366, and/or a variable light chain amino acid sequence of SEQ ID NO: 68, SEQ ID NO: 70, SEQ ID NO: 367, SEQ ID NO: 368, or SEQ ID NO: 369.

[0501] In some embodiments, an anti-IL4R antibody comprises a feline heavy chain constant region selected from an IgG1a, IgG1b, and IgG2 constant region. In some embodiments, an anti-IL4R antibody comprises is a wild-type or variant feline IgG1a, IgG1b, or IgG2 Fc polypeptide, as described herein. In some embodiments, an anti-IL4R antibody comprises a feline IgG1a Fc polypeptide comprising the amino acid sequence of SEQ ID NO: 203 or 204; a feline IgG1b Fc polypeptide comprising the amino acid sequence of SEQ ID NO: 205 or 206; I(c) a feline IgG2 Fc polypeptide comprising the amino acid sequence of SEQ ID NO: 207. In some embodiments, an anti-IL4R antibody comprises a variant feline IgG1a Fc polypeptide comprising the amino acid sequence of SEQ ID NO: 208, 209, 210, 217, 218, 222, or 223; a variant feline IgG1b Fc polypeptide comprising the amino acid sequence of SEQ ID NO: 211, 212, 213, 219, 220, 224, or 225; or (c) a variant feline IgG2 Fc polypeptide comprising the amino acid sequence of SEQ ID NO: 214, 215, 216, 221, or 226.

[0502] In some embodiments, an anti-IL4R antibody comprises a feline light chain constant region, such as a feline κ light constant region. In some embodiments, an anti-IL4R antibody comprises is a wild-type feline κ light constant region (e.g., SEQ ID NO: 241) or variant feline κ light constant region (e.g., SEQ ID NO: 242).

[0503] In some embodiments, an anti-IL4R antibody comprises a felinized variable heavy chain of Clone B or Clone I and a variant feline IgG Fc polypeptide, such as SEQ ID NO: 79, 80, 82, 372, 373, 83, 374, or 375. In some embodiments, an anti-IL4R antibody comprises a felinized variable light chain of Clone B or Clone I and a feline κ light chain constant region, such as SEQ ID NO: 81, 84, 376, 377, or 378.

[0504] In some embodiments, an anti-IL4R antibody is a bispecific antibody having a binding specificity for IL4R and a different target molecule, such as IL17, IL31, TNFα, CD20, CD19, CD25, IL4, IL13, IL23, IgE, CD11α, IL6R, α4-Intergrin, IL12, IL1β, or BlyS. In some embodiments, a bispecific antibody comprises a caninized or felinized Clone B or Clone I variable heavy chain and a “knob” variant canine or feline IgG Fc polypeptide that can pair with a variant κ constant region (e.g., SEQ ID NO: 243). In some embodiments, a bispecific antibody comprises a variable heavy chain directed to a different target molecule (e.g., canine or feline IL31) and a “hole” variant canine or feline IgG Fc polypeptide (e.g., SEQ ID NO: 245). In some embodiments, a bispecific antibody comprises a caninized or felinized Clone B or Clone I variable light chain and a variable κ constant region that can pair with the knob Fc polypeptide (e.g., SEQ ID NO: 244). In some embodiments, a bispecific antibody comprises a variable light chain directed to a different target molecule (e.g., canine or feline IL31) and a wild-type κ constant region that can pair with the hole Fc polypeptide (e.g., SEQ ID NO: 246).

[0505] Other bispecific antibody arrangements may be prepared. For example, in some embodiments, a bispecific antibody comprises a caninized or felinized Clone B or Clone I variable heavy chain and a “hole” variant canine or feline IgG Fc polypeptide that can pair with a variant κ constant region. In some embodiments, a bispecific antibody comprises a variable heavy chain directed to a different target molecule (e.g., canine or feline IL31) and a “knob” variant canine or feline IgG Fc polypeptide. In some embodiments, a bispecific antibody comprises a caninized or felinized Clone B or Clone I variable light chain and a variable κ constant region that can pair with the hole Fc polypeptide. In some embodiments, a bispecific antibody comprises a variable light chain directed to a different target molecule (e.g., canine or feline IL31) and a wild-type κ constant region that can pair with the knob Fc polypeptide.

[0506] The term “affinity” means the strength of the sum total of noncovalent interactions between a single binding site of a molecule (for example, an antibody) and its binding partner (for example, an antigen). The affinity of a molecule X for its partner Y can generally be represented by the dissociation constant (K_{D}). Affinity can be measured by common methods known in the art, such as, for example, immunoblot, ELISA KD, KinEx A, biolayer interferometry (BLI), or surface plasmon resonance devices.

[0507] The terms “K_{D},” “K_{d},” “Kd” or “Kd value” as used interchangeably to refer to the equilibrium dissociation constant of an antibody-antigen interaction. In some embodiments, the K_{d} of the antibody is measured by using biolayer interferometry assays using a biosensor, such as an Octet® System (Pall ForteBio LLC, Fremont, CA) according to the supplier's instructions. Briefly, biotinylated antigen is bound to the sensor tip and the association of antibody is monitored for ninety seconds and the dissociation is monitored for 600 seconds. The buffer for dilutions and binding steps is 20 mM phosphate, 150 mM NaCl, pH 7.2. A buffer only blank curve is subtracted to correct for any drift. The data are fit to a 2:1 binding model using ForteBio data analysis software to determine association rate constant (kₒₙ), dissociation rate constant (k_{off}), and the K_{d}. The equilibrium dissociation constant (K_{d}) is calculated as the ratio of k_{off}/kₒₙ. The term “kon” refers to the rate constant for association of an antibody to an antigen and the term “koff” refers to the rate constant for dissociation of an antibody from the antibody/antigen complex.

[0508] The term “binds” to an antigen or epitope is a term that is well understood in the art, and methods to determine such binding are also well known in the art. A molecule is said to exhibit “binding” if it reacts, associates with, or has affinity for a particular cell or substance and the reaction, association, or affinity is detectable by one or more methods known in the art, such as, for example, immunoblot, ELISA KD, KinEx A, biolayer interferometry (BLI), surface plasmon resonance devices, or etc.

[0509] “Surface plasmon resonance” denotes an optical phenomenon that allows for the analysis of real-time biospecific interactions by detection of alterations in protein concentrations within a biosensor matrix, for example using the BIAcore™ system (BIAcore International AB, a GE Healthcare company, Uppsala, Sweden and Piscataway, N.J.). For further descriptions, see Jonsson et al. (1993) Ann. Biol. Clin. 51: 19-26.

[0510] “Biolayer interferometry” refers to an optical analytical technique that analyzes the interference pattern of light reflected from a layer of immobilized protein on a biosensor tip and an internal reference layer. Changes in the number of molecules bound to the biosensor tip cause shifts in the interference pattern that can be measured in real-time. A nonlimiting exemplary device for biolayer interferometry is an Octet® system (Pall ForteBio LLC). See, e.g., Abdiche et al., 2008, Anal. Biochem. 377: 209-277.

[0511] In some embodiments, an anti-IL4R antibody binds to canine IL4R or feline IL4R with a dissociation constant (Kd) of less than 5×10⁻⁶ M, less than 1×10⁻⁶ M, less than 5×10⁻⁷ M, less than 1×10⁻⁷ M, less than 5×10⁻⁸ M, less than 1×10⁻⁸ M, less than 5×10⁻⁹ M, less than 1×10⁻⁹ M, less than 5×10⁻¹⁹ M, less than 1×10⁻¹⁹ M, less than 5×10⁻¹¹ M, less than 1×10⁻¹¹ M, less than 5×10⁻¹² M, or less than 1×10⁻¹² M, as measured by biolayer interferometry. In some embodiments, an anti-IL4R antibody binds to canine IL4R or feline IL4R with a Kd of between 5×10⁻⁶ M and 1×10⁻⁶ M, between 5×10⁻⁶ M and 5×10⁻⁷ M, between 5×10⁻⁶ M and 1×10⁻⁷ M, between 5×10⁻⁶ M and 5×10⁻⁸ M, 5×10⁻⁶ M and 1×10⁻⁸ M, between 5×10⁻⁶ M and 5×10⁻⁹ M, between 5×10⁻⁶ M and 1×10⁻⁹ M, between 5×10⁻⁶ M and 5×10⁻¹⁰ M, between 5×10⁻⁶ M and 1×10⁻¹⁰ M, between 5×10⁻⁶ M and 5×10⁻¹¹ M, between 5×10⁻⁶ M and 1×10⁻¹¹ M, between 5×10⁻⁶ M and 5×10⁻¹² M, between 5×10⁻⁶ M and 1×10⁻¹² M, between 1×10⁻⁶ M and 5×10⁻⁷ M, between 1×10⁻⁶ M and 1×10⁻⁷ M, between 1×10⁻⁶ M and 5×10⁻⁸ M, 1×10⁻⁶ M and 1×10⁻⁸ M, between 1×10⁻⁶ M and 5×10⁻⁹ M, between 1×10⁻⁶ M and 1×10⁻⁹ M, between 1×10⁻⁶ M and 5×10⁻¹⁰ M, between 1×10⁻⁶ M and 1×10⁻¹⁰ M, between 1×10⁻⁶ M and 5×10⁻¹¹ M, between 1×10⁻⁶ M and 1×10⁻¹¹ M, between 1×10⁻⁶ M and 5×10⁻¹² M, between 1×10⁻⁶ M and 1×10⁻¹² M, between 5×10⁻⁷ M and 1×10⁻⁷ M, between 5×10⁻⁷ M and 5×10⁻⁸ M, 5×10⁻⁷ M and 1×10⁻⁸ M, between 5×10⁻⁷ M and 5×10⁻⁹ M, between 5×10⁻⁷ M and 1×10⁻⁹ M, between 5×10⁻⁷ M and 5×10⁻¹⁰ M, between 5×10⁻⁷ M and 1×10⁻¹⁰ M, between 5×10⁻⁷ M and 5×10⁻¹¹ M, between 5×10⁻⁷ M and 1×10⁻¹¹ M, between 5×10⁻⁷ M and 5×10⁻¹² M, between 5×10⁻⁷ M and 1×10⁻¹² M, between 1×10⁻⁷ M and 5×10⁻⁸ M, 1×10⁻⁷ M and 1×10⁻⁸ M, between 1×10⁻⁷ M and 5×10⁻⁹ M, between 1×10⁻⁷ M and 1×10⁻⁹ M, between 1×10⁻⁷ M and 5×10⁻¹⁰ M, between 1×10⁻⁷ M and 1×10⁻¹⁰ M, between 1×10⁻⁷ M and 5×10⁻¹¹ M, between 1×10⁻⁷ M and 1×10⁻¹¹ M, between 1×10⁻⁷ M and 5×10⁻¹² M, between 1×10⁻⁷ M and 1×10⁻¹² M, between 5×10⁻⁸ M and 1×10⁻⁸ M, between 5×10⁻⁸ M and 5×10⁻⁹ M, between 5×10⁻⁸ M and 1×10⁻⁹ M, between 5×10⁻⁸ M and 5×10⁻¹⁰ M, between 5×10⁻⁸ M and 1×10⁻¹⁰ M, between 5×10⁻⁸ M and 5×10⁻¹¹ M, between 5×10⁻⁸ M and 1×10⁻¹¹ M, between 5×10⁻⁸ M and 5×10⁻¹² M, between 5×10⁻⁸ M and 1×10⁻¹² M, 1×10⁻⁸ M and 5×10⁻⁹ M, between 1×10⁻⁸ M and 1×10⁻⁹ M, between 1×10⁻⁸ M and 5×10⁻¹⁰ M, between 1×10⁻⁸ M and 1×10⁻¹⁰ M, between 1×10⁻⁸ M and 5×10⁻¹¹ M, between 1×10⁻⁸ M and 1×10⁻¹¹ M, between 1×10⁻⁸ M and 5×10⁻¹² M, between 1×10⁻⁸ M and 1×10⁻¹² M, between 5×10⁻⁹ M and 1×10⁻⁹ M, between 5×10⁻⁹ M and 5×10⁻¹⁰ M, between 5×10⁻⁹ M and 1×10⁻¹⁰ M, between 5×10⁻⁹ M and 5×10⁻¹¹ M, between 5×10⁻⁹ M and 1×10⁻¹¹ M, between 5×10⁻⁹ M and 5×10⁻¹² M, between 5×10⁻⁹ M and 1×10⁻¹² M, between 1×10⁻⁹ M and 5×10⁻¹⁰ M, between 1×10⁻⁹ M and 1×10⁻¹⁰ M, between 1×10⁻⁹ M and 5×10⁻¹¹ M, between 1×10⁻⁹ M and 1×10⁻¹¹ M, between 1×10⁻⁹ M and 5×10⁻¹² M, between 1×10⁻⁹ M and 1×10⁻¹² M, between 5×10⁻¹⁰ M and 1×10⁻¹⁰ M, between 5×10⁻¹⁰ M and 5×10⁻¹¹ M, between, 1×10⁻¹⁰ M and 5×10⁻¹¹ M, 1×10⁻¹⁰ M and 1×10⁻¹¹ M, between 1×10⁻¹⁰ M and 5×10⁻¹² M, between 1×10⁻¹⁰ M and 1×10⁻¹² M, between 5×10⁻¹¹ M and 1×10⁻¹² M, between 5×10⁻¹¹ M and 5×10⁻¹² M, between 5×10⁻¹¹ M and 1×10⁻¹² M, between 1×10⁻¹¹ M and 5×10⁻¹² M, or between 1×10⁻¹¹ M and 1×10⁻¹² M, as measured by biolayer interferometry. In some embodiments, an anti-IL4R antibody binds to canine IL4R or feline IL4R, as determined by immunoblot analysis.

[0512] In some embodiments, an anti-IL4R antibody is provided that competes with an anti-IL4R antibody described herein (such as Clone B or Clone I) for binding to IL4R. In some embodiments, an antibody that competes with binding with any of the antibodies provided herein can be made or used. In some embodiments, an anti-IL4R antibody is provided that competes with monoclonal Clone B or Clone I antibody in binding to canine IL4R or feline IL4R.

[0513] The term “vector” is used to describe a polynucleotide that can be engineered to contain a cloned polynucleotide or polynucleotides that can be propagated in a host cell. A vector can include one or more of the following elements: an origin of replication, one or more regulatory sequences (such as, for example, promoters or enhancers) that regulate the expression of the polypeptide of interest, or one or more selectable marker genes (such as, for example, antibiotic resistance genes and genes that can be used in colorimetric assays, for example, (3-galactosidase). The term “expression vector” refers to a vector that is used to express a polypeptide of interest in a host cell.

[0514] A “host cell” refers to a cell that may be or has been a recipient of a vector or isolated polynucleotide. Host cells may be prokaryotic cells or eukaryotic cells. Exemplary eukaryotic cells include mammalian cells, such as primate or non-primate animal cells; fungal cells, such as yeast; plant cells; and insect cells. Nonlimiting exemplary mammalian cells include, but are not limited to, NS0 cells, PER.C6® cells (Crucell), 293 cells, and CHO cells, and their derivatives, such as 293-6E, DG44, CHO-S, and CHO-K cells. Host cells include progeny of a single host cell, and the progeny may not necessarily be completely identical (in morphology or in genomic DNA complement) to the original parent cell due to natural, accidental, or deliberate mutation. A host cell includes cells transfected in vivo with a polynucleotide(s) encoding an amino acid sequence(s) provided herein.

[0515] The term “isolated” as used herein refers to a molecule that has been separated from at least some of the components with which it is typically found in nature or produced. For example, a polypeptide is referred to as “isolated” when it is separated from at least some of the components of the cell in which it was produced. Where a polypeptide is secreted by a cell after expression, physically separating the supernatant containing the polypeptide from the cell that produced it is considered to be “isolating” the polypeptide. Similarly, a polynucleotide is referred to as “isolated” when it is not part of the larger polynucleotide (such as, for example, genomic DNA or mitochondrial DNA, in the case of a DNA polynucleotide) in which it is typically found in nature, or is separated from at least some of the components of the cell in which it was produced, for example, in the case of an RNA polynucleotide. Thus, a DNA polynucleotide that is contained in a vector inside a host cell may be referred to as “isolated.” In some embodiments, the anti-IL4R antibody is purified using chromatography, such as size exclusion chromatography, ion exchange chromatography, protein A column chromatography, hydrophobic interaction chromatography, and CHT chromatography.

[0516] The term “companion animal species” refers to an animal suitable to be a companion to humans. In some embodiments, a companion animal species is a small mammal, such as a canine, feline, dog, cat, horse, rabbit, ferret, guinea pig, rodent, etc. In some embodiments, a companion animal species is a farm animal, such as a horse, cow, pig, etc.

[0517] To “reduce” or “inhibit” means to decrease, reduce, or arrest an activity, function, or amount as compared to a reference. In some embodiments, by “reduce” or “inhibit” is meant the ability to cause an overall decrease of 20% or greater. In some embodiments, by “reduce” or “inhibit” is meant the ability to cause an overall decrease of 50% or greater. In some embodiments, by “reduce” or “inhibit” is meant the ability to cause an overall decrease of 75%, 85%, 90%, 95%, or greater. In some embodiments, the amount noted above is inhibited or decreased over a period of time, relative to a control dose (such as a placebo) over the same period of time. A “reference” as used herein, refers to any sample, standard, or level that is used for comparison purposes. A reference may be obtained from a healthy or non-diseased sample. In some examples, a reference is obtained from a non-diseased or non-treated sample of a companion animal. In some examples, a reference is obtained from one or more healthy animals of a particular species, which are not the animal being tested or treated.

[0518] The term “substantially reduced,” as used herein, denotes a sufficiently high degree of reduction between a numeric value and a reference numeric value such that one of skill in the art would consider the difference between the two values to be of statistical significance within the context of the biological characteristic measured by said values. In some embodiments, the substantially reduced numeric values is reduced by greater than about any one of 10%, 15% 20%, 25%, 30%, 35%, 40%, 45%, 50%, 60%, 70%, 80%, 90%, or 100% compared to the reference value.

[0519] The terms “pharmaceutical formulation” and “pharmaceutical composition” refer to a preparation which is in such form as to permit the biological activity of the active ingredient(s) to be effective, and which contains no additional components that are unacceptably toxic to a subject to which the formulation would be administered.

[0520] A “pharmaceutically acceptable carrier” refers to a non-toxic solid, semisolid, or liquid filler, diluent, encapsulating material, formulation auxiliary, or carrier conventional in the art for use with a therapeutic agent that together comprise a “pharmaceutical composition” for administration to a subject. A pharmaceutically acceptable carrier is non-toxic to recipients at the dosages and concentrations employed and is compatible with other ingredients of the formulation. The pharmaceutically acceptable carrier is appropriate for the formulation employed. Examples of pharmaceutically acceptable carriers include alumina; aluminum stearate; lecithin; serum proteins, such as human serum albumin, canine or other animal albumin; buffers such as phosphate, citrate, tromethamine or HEPES buffers; glycine; sorbic acid; potassium sorbate; partial glyceride mixtures of saturated vegetable fatty acids; water; salts or electrolytes, such as protamine sulfate, disodium hydrogen phosphate, potassium hydrogen phosphate, sodium chloride, zinc salts, colloidal silica, or magnesium trisilicate; polyvinyl pyrrolidone, cellulose-based substances; polyethylene glycol; sucrose; mannitol; or amino acids including, but not limited to, arginine.

[0521] The pharmaceutical composition can be stored in lyophilized form. Thus, in some embodiments, the preparation process includes a lyophilization step. The lyophilized composition may then be reformulated, typically as an aqueous composition suitable for parenteral administration, prior to administration to the dog, cat, or horse. In other embodiments, particularly where the antibody is highly stable to thermal and oxidative denaturation, the pharmaceutical composition can be stored as a liquid, i.e., as an aqueous composition, which may be administered directly, or with appropriate dilution, to the dog, cat, or horse. A lyophilized composition can be reconstituted with sterile Water for Injection (WFI). Bacteriostatic reagents, such benzyl alcohol, may be included. Thus, the invention provides pharmaceutical compositions in solid or liquid form.

[0522] The pH of the pharmaceutical compositions may be in the range of from about pH 5 to about pH 8, when administered. The compositions of the invention are sterile if they are to be used for therapeutic purposes. Sterility can be achieved by any of several means known in the art, including by filtration through sterile filtration membranes (e.g., 0.2 micron membranes). Sterility may be maintained with or without anti-bacterial agents.

[0523] The antibodies or pharmaceutical compositions comprising the antibodies of the invention may be useful for treating an IL4/IL13-induced condition. As used herein, an “IL4/IL13-induced condition” means a disease associated with, caused by, or characterized by, elevated levels or altered gradients of IL4/1L13 concentration. Such IL4/IL13-induced conditions include, but are not limited to, a pruritic or an allergic disease. In some embodiments, the IL4/IL13-induced condition is atopic dermatitis, allergic dermatitis, pruritus, asthma, psoriasis, scleroderma, or eczema. An IL4/IL13-induced condition may be exhibited in a companion animal, including, but not limited to, canine or feline.

[0524] As used herein, “treatment” is an approach for obtaining beneficial or desired clinical results. “Treatment” as used herein, covers any administration or application of a therapeutic for disease in a mammal, including a companion animal. For purposes of this disclosure, beneficial or desired clinical results include, but are not limited to, any one or more of: alleviation of one or more symptoms, diminishment of extent of disease, preventing or delaying spread of disease, preventing or delaying recurrence of disease, delay or slowing of disease progression, amelioration of the disease state, inhibiting the disease or progression of the disease, inhibiting or slowing the disease or its progression, arresting its development, and remission (whether partial or total). Also encompassed by “treatment” is a reduction of pathological consequence of a proliferative disease. The methods provided herein contemplate any one or more of these aspects of treatment. In-line with the above, the term treatment does not require one-hundred percent removal of all aspects of the disorder.

[0525] In some embodiments, an anti-IL4R antibody or a pharmaceutical composition comprising an anti-IL4R antibody can be utilized in accordance with the methods herein to treat IL4/IL13-induced conditions. In some embodiments, an anti-IL4R antibody or a pharmaceutical composition comprising an anti-IL4R antibody is administered to a companion animal, such as a canine or feline, to treat an IL4/IL13-induced condition.

[0526] A “therapeutically effective amount” of a substance/molecule, agonist or antagonist may vary according to factors such as the type of disease to be treated, the disease state, the severity and course of the disease, the type of therapeutic purpose, any previous therapy, the clinical history, the response to prior treatment, the discretion of the attending veterinarian, age, sex, and weight of the animal, and the ability of the substance/molecule, agonist or antagonist to elicit a desired response in the animal. A therapeutically effective amount is also one in which any toxic or detrimental effects of the substance/molecule, agonist or antagonist are outweighed by the therapeutically beneficial effects. A therapeutically effective amount may be delivered in one or more administrations. A therapeutically effective amount refers to an amount effective, at dosages and for periods of time necessary, to achieve the desired therapeutic or prophylactic result.

[0527] In some embodiments, an anti-IL4R antibody or pharmaceutical composition comprising an anti-IL4R antibody is administered parenterally, by subcutaneous administration, intravenous infusion, or intramuscular injection. In some embodiments, an anti-IL4R antibody or pharmaceutical composition comprising an anti-IL4R antibody is administered as a bolus injection or by continuous infusion over a period of time. In some embodiments, an anti-IL4R antibody or pharmaceutical composition comprising an anti-IL4R antibody is administered by an intramuscular, an intraperitoneal, an intracerebrospinal, a subcutaneous, an intra-arterial, an intrasynovial, an intrathecal, or an inhalation route.

[0528] Anti-IL4R antibodies described herein may be administered in an amount in the range of 0.01 mg/kg body weight to 100 mg/kg body weight per dose. In some embodiments, anti-IL4R antibodies may be administered in an amount in the range of 0.5 mg/kg body weight to 50 mg/kg body weight per dose. In some embodiments, anti-IL4R antibodies may be administered in an amount in the range of 0.1 mg/kg body weight to 10 mg/kg body weight per dose. In some embodiments, anti-IL4R antibodies may be administered in an amount in the range of 0.1 mg/kg body weight to 100 mg/kg body weight per dose. In some embodiments, anti-IL4R antibodies may be administered in an amount in the range of 1 mg/kg body weight to 10 mg/kg body weight per dose. In some embodiments, anti-IL4R antibodies may be administered in an amount in the range of 0.5 mg/kg body weight to 100 mg/kg body, in the range of 1 mg/kg body weight to 100 mg/kg body weight, in the range of 5 mg/kg body weight to 100 mg/kg body weight, in the range of 10 mg/kg body weight to 100 mg/kg body weight, in the range of 20 mg/kg body weight to 100 mg/kg body weight, in the range of 50 mg/kg body weight to 100 mg/kg body weight, in the range of 1 mg/kg body weight to 10 mg/kg body weight, in the range of 5 mg/kg body weight to 10 mg/kg body weight, in the range of 0.5 mg/kg body weight to 10 mg/kg body weight, in the range of 0.01 mg/kg body weight to 0.5 mg/kg body weight, in the range of 0.01 mg/kg body weight to 0.1 mg/kg body weight, or in the range of 5 mg/kg body weight to 50 mg/kg body weight.

[0529] An anti-IL4R antibody or a pharmaceutical composition comprising an anti-IL4R antibody can be administered to a companion animal at one time or over a series of treatments. For example, an anti-IL4R antibody or a pharmaceutical composition comprising an anti-IL4R antibody may be administered at least once, more than once, at least twice, at least three times, at least four times, or at least five times.

[0530] In some embodiments, the dose is administered once per week for at least two or three consecutive weeks, and in some embodiments, this cycle of treatment is repeated two or more times, optionally interspersed with one or more weeks of no treatment. In other embodiments, the therapeutically effective dose is administered once per day for two to five consecutive days, and in some embodiments, this cycle of treatment is repeated two or more times, optionally interspersed with one or more days or weeks of no treatment.

[0531] Administration “in combination with” one or more further therapeutic agents includes simultaneous (concurrent) and consecutive or sequential administration in any order. The term “concurrently” is used herein to refer to administration of two or more therapeutic agents, where at least part of the administration overlaps in time or where the administration of one therapeutic agent falls within a short period of time relative to administration of the other therapeutic agent. For example, the two or more therapeutic agents are administered with a time separation of no more than about a specified number of minutes. The term “sequentially” is used herein to refer to administration of two or more therapeutic agents where the administration of one or more agent(s) continues after discontinuing the administration of one or more other agent(s), or wherein administration of one or more agent(s) begins before the administration of one or more other agent(s). For example, administration of the two or more therapeutic agents are administered with a time separation of more than about a specified number of minutes. As used herein, “in conjunction with” refers to administration of one treatment modality in addition to another treatment modality. As such, “in conjunction with” refers to administration of one treatment modality before, during or after administration of the other treatment modality to the animal.

[0532] In some embodiments, the method comprises administering in combination with an anti-IL4R antibody or a pharmaceutical composition comprising an anti-IL4R antibody, a Jak inhibitor, a Tyk2 inhibitor, a PI3K inhibitor, ERK inhibitor. In some embodiments, the method comprises administering in combination with an anti-IL4R antibody or a pharmaceutical composition comprising an anti-IL4R antibody, an anti-IL31 antibody, an anti-IL17 antibody, an anti-TNFα antibody, an anti-CD20 antibody, an anti-CD19 antibody, an anti-CD25 antibody, an anti-IL4 antibody, an anti-IL13 antibody, an anti-IL23 antibody, an anti-IgE antibody, an anti-CD11α antibody, anti-IL6R antibody, anti-α4-Intergrin antibody, an anti-IL12 antibody, an anti-IL1β antibody, or an anti-BlyS antibody.

[0533] Provided herein are methods of exposing to a cell an anti-IL4R antibody or a pharmaceutical composition comprising an anti-IL4R antibody under conditions permissive for binding of the antibody to IL4R. In some embodiments, the cell is a canine cell, a feline cell, or an equine cell. In some embodiments, the cell is a canine DH82 cell. In some embodiments, the cell is exposed to the antibody or pharmaceutical composition ex vivo. In some embodiments, the cell is exposed to the antibody or pharmaceutical composition in vivo. In some embodiments, a cell is exposed to the anti-IL4R antibody. In some embodiments, a cell is exposed to the anti-IL4R antibody or the pharmaceutical composition under conditions permissive for binding of the antibody to extracellular IL4R. In some embodiments, a cell may be exposed in vivo to the anti-IL4R antibody or the pharmaceutical composition by any one or more of the administration methods described herein, including but not limited to, intraperitoneal, intramuscular, intravenous injection into the subject. In some embodiments, a cell may be exposed ex vivo to the anti-IL4R antibody or the pharmaceutical composition by exposing the cell to a culture medium comprising the antibody or the pharmaceutical composition. In some embodiments, the permeability of the cell membrane may be affected by the use of any number of methods understood by those of skill in the art (such as electroporating the cells or exposing the cells to a solution containing calcium chloride) before exposing the cell to a culture medium comprising the antibody or the pharmaceutical composition.

[0534] Provided herein are methods of using the anti-IL4R antibodies, polypeptides and polynucleotides for detection, diagnosis and monitoring of an IL4R-induced condition. Provided herein are methods of determining whether a companion animal will respond to anti-IL4R antibody therapy. In some embodiments, the method comprises detecting whether the animal has cells that express IL4R using an anti-IL4R antibody. In some embodiments, the method of detection comprises contacting the sample with an antibody, polypeptide, or polynucleotide and determining whether the level of binding differs from that of a reference or comparison sample (such as a control). In some embodiments, the method may be useful to determine whether the antibodies or polypeptides described herein are an appropriate treatment for the subject animal.

[0535] In some embodiments, the sample is a biological sample. The term “biological sample” means a quantity of a substance from a living thing or formerly living thing. In some embodiments, the biological sample is a cell or cell/tissue lysate. In some embodiments, the biological sample includes, but is not limited to, blood, (for example, whole blood), plasma, serum, urine, synovial fluid, and epithelial cells.

[0536] In some embodiments, the cells or cell/tissue lysate are contacted with an anti-IL4R antibody and the binding between the antibody and the cell is determined. When the test cells show binding activity as compared to a reference cell of the same tissue type, it may indicate that the subject would benefit from treatment with an anti-IL4R antibody. In some embodiments, the test cells are from tissue of a companion animal.

[0537] Various methods known in the art for detecting specific antibody-antigen binding can be used. Exemplary immunoassays which can be conducted include fluorescence polarization immunoassay (FPIA), fluorescence immunoassay (FIA), enzyme immunoassay (EIA), nephelometric inhibition immunoassay (NIA), enzyme linked immunosorbent assay (ELISA), and radioimmunoassay (RIA). An indicator moiety, or label group, can be attached to the subject antibodies and is selected so as to meet the needs of various uses of the method which are often dictated by the availability of assay equipment and compatible immunoassay procedures. Appropriate labels include, without limitation, radionuclides (for example ¹²⁵I, ¹³¹I, ³⁵S, ³H, or ³²P), enzymes (for example, alkaline phosphatase, horseradish peroxidase, luciferase, or β-galactosidase), fluorescent moieties or proteins (for example, fluorescein, rhodamine, phycoerythrin, GFP, or BFP), or luminescent moieties (for example, Qdot™ nanoparticles supplied by the Quantum Dot Corporation, Palo Alto, Calif.). General techniques to be used in performing the various immunoassays noted above are known to those of ordinary skill in the art.

[0538] For purposes of diagnosis, the polypeptide including antibodies can be labeled with a detectable moiety including but not limited to radioisotopes, fluorescent labels, and various enzyme-substrate labels know in the art. Methods of conjugating labels to an antibody are known in the art. In some embodiments, the anti-IL4R antibodies need not be labeled, and the presence thereof can be detected using a second labeled antibody which binds to the first anti-IL4R antibody. In some embodiments, the anti-IL4R antibody can be employed in any known assay method, such as competitive binding assays, direct and indirect sandwich assays, and immunoprecipitation assays. Zola, Monoclonal Antibodies: A Manual of Techniques, pp. 147-158 (CRC Press, Inc. 1987). The anti-IL4R antibodies and polypeptides can also be used for in vivo diagnostic assays, such as in vivo imaging. Generally, the antibody or the polypeptide is labeled with a radionuclide (such as ¹¹¹In, ⁹⁹Tc, ¹⁴C, ¹³¹I, ¹²⁵I, ³H, or any other radionuclide label, including those outlined herein) so that the cells or tissue of interest can be localized using immunoscintiography. The antibody may also be used as staining reagent in pathology using techniques well known in the art.

[0539] In some embodiments, a first antibody is used for a diagnostic and a second antibody is used as a therapeutic. In some embodiments, the first and second antibodies are different. In some embodiments, the first and second antibodies can both bind to the antigen at the same time, by binding to separate epitopes.

[0540] Provided herein are methods for screening for a molecule that inhibits IL4 and/or IL13 signaling function comprising exposing to a canine DH82 cell the molecule and detecting whether there is a reduction in STAT6 phosphorylation. In some embodiments, the molecule comprises an anti-IL4R antibody or small molecule antagonist of IL4R. In some embodiments, the molecule comprises an anti-IL4R antibody or small molecule antagonist of IL13R. In some embodiments, the molecule comprises an anti-IL4R antibody or small molecule antagonist of IL4. In some embodiments, the molecule comprises an anti-IL4R antibody or small molecule antagonist of IL13.

[0541] The following examples illustrate particular aspects of the disclosure and are not intended in any way to limit the disclosure.

### EXAMPLES

### Example 1

### Preparation of IL4 and IL4R ECD Reagents

[0542] Nucleotide sequences encoding fusion proteins comprising (1) either full length canine IL4R (SEQ ID NO: 94), a canine, feline, equine, murine, or human IL4R ECDs (SEQ ID NO: 99, 100, 101, 102, or 103), or a canine, feline, or equine IL4 (SEQ ID NOs: 121, 122, or 123), (2) one or more His6, human Fc, and/or FLAG tag, (3) one or more linker sequences, and (4) a leader sequence were synthesized and cloned into separate mammalian expression plasmids. The plasmids were separately transfected into 293 cells, cultured, and supernatants containing secreted IL4R ECD or IL4 fusion polypeptides were separately collected and filtered. The poly-His fusion proteins were affinity purified using Ni-NTA column (GE Healthcare Life Sciences) and human Fc fusion proteins were affinity purified using CaptivA® Protein A Affinity Resin (Repligen). The purified fusion proteins were confirmed by SDS-PAGE analysis (data not shown). The fusion proteins (before and after processing) are summarized in Table 3, below.

TABLE 3

| SEQ ID NO: | Description |
|---|---|
| 104 | Canine IL4R_C-FLAG (with leader) |
| 105 | Canine IL4R_C-FLAG (processed) |
| 106 | Canine IL4R-ECD_C-His6 (with leader) |
| 107 | Canine IL4R-ECD_C-His6 (processed) |
| 108 | Canine IL4R-ECD_C-HuFc_His6 (with leader) |
| 109 | Canine IL4R-ECD_C-HuFc_His6 (processed) |
| 110 | Feline IL4R-ECD_C-HuFc_His6 (with leader) |
| 111 | Feline IL4R-ECD_C-HuFc_His6 (processed) |
| 112 | Equine IL4R-ECD_C-HuFc_His6 (with leader) |
| 113 | Equine IL4R-ECD_C-HuFc_His6 (processed) |
| 114 | Murine IL4R-ECD_C-HuFc_His6 (with leader) |
| 115 | Murine IL4R-ECD_C-HuFc_His6 (processed) |
| 116 | Human IL4R-ECD_C-HuFc_His6 (with leader) |
| 117 | Human IL4R-ECD_C-HuFc_His6 (processed) |
| 124 | Canine IL4_N-His6 (with leader) |
| 125 | Canine IL4_N-His6 (processed) |
| 126 | Canine IL4_C-His6 (with leader) |
| 127 | Canine IL4_C-His6 (processed) |
| 128 | Feline IL4_C-His6 (with leader) |
| 129 | Feline IL4_C-His6 (processed) |
| 130 | Equine IL4_C-His6 (with leader) |
| 131 | Equine IL4_C-His6 (processed) |
| 156 | Canine IL13_C-His6 (with leader) |
| 157 | Canine IL13_C-His6 (processed) |
| 158 | Feline IL13_C-His6 (with leader) |
| 159 | Feline IL13_C-His6 (processed) |

### Example 2

### Identification of Mouse Monoclonal Antibodies that Bind to Canine IL4R

[0543] Mouse monoclonal antibodies were identified following standard immunization with purified canine IL4R-ECD_C-His6 (SEQ ID NO: 107) as immunogen. Different adjuvants were used during immunizations (Akesobio, Inc, China) and monoclonal antibodies were obtained through standard hybridoma technology.

[0544] Enzyme linked immunosorbent assay (ELISA) was developed to screen for clones that produce IL4R binding antibodies. First, biotinylated IL4R-ECD_C-His6 (SEQ ID NO: 107) was introduced into streptavidin-coated wells Immunized serum was then added to the wells followed by washing and detection with HRP-conjugated anti-mouse antibodies. The presence of canine IL4R binding antibodies developed a positive signal. Over 121 ELISA-positive top clones were identified.

[0545] The 121 antibody clones were screened for the ability to block interaction between canine IL4 and canine IL4R ECD by ELISA. Canine IL4R-ECD_C-HuFc_His6 (SEQ ID NO: 109) was immobilized to wells coated with anti-human Fc. Hybridoma supernatant was added, followed by biotinylated canine IL4_C-His6 (SEQ ID NO: 127), and then Streptavidin-HRP. Diminished signal suggested reduced interaction between canine IL4R ECD and canine IL4. Eleven clones were identified and designated as Clones A, B, C, D, E, F, G, H, I, J, and K. Each of the clones was further cultured and the IgG antibodies produced were purified using standard Protein A affinity chromatography.

[0546] The binding of each clone to canine IL4R ECD was confirmed by biosensor assay (Forte Bio Octet). First, biotinylated canine IL4R-ECD_C-His6 (SEQ ID NO: 107) was bound to streptavidin sensor tips. Then, binding of each of the eleven antibody clones to the canine IL4R-ECD-bound sensor tip was assessed.

### Example 3

### Clone B and Clone I Antibodies Block Binding of IL4 to Canine IL4R

[0547] The eleven antibodies were evaluated by biosensor assay (Forte Bio Octet) for the ability of an antibody-IL4R ECD complex to reduce binding of ligand canine IL4. Biotinylated canine IL4R-ECD_C-His6 (SEQ ID NO: 107) was captured on streptavidin sensor tips. IL4R ECD-bound tips were separately exposed to each of the eleven murine antibodies (Clones A, B, C, D, E, F, G, H, I, J, and K) at 20 μg/mL to form IL4R ECD-antibody binary complexes. The complex-bound tips were then exposed to canine IL4_C-His6 (SEQ ID NO: 127) at a high concentration (240 μg/mL). Canine IL4R ECD-antibody complexes of Clones B and I failed to bind to canine IL4, suggesting that both Clones B and I are neutralizing antibodies.

### Example 4

### Identification of DNA Sequences Encoding VH and VL of Monoclonal Antibodies

[0548] Hybridoma Clones B and I were pelleted, and total RNA was extracted. Oligonucleotide primers for amplifying mouse immunoglobulin (Ig) variable domains were used to obtain cDNA using standard techniques. The heavy and light chains of each clone were sequenced and analyzed by sequence alignment (FIG. 1A and FIG. 1B, respectively). Exemplary CDR sequences of Clone B were identified as SEQ ID NOs 7-9 and 14-16 and of Clone I were identified as SEQ ID NOs 29-31 and 36-38. Exemplary consensus CDR sequences were identified as CDR-H1: GYTFTSYVMH (SEQ ID NO: 1), CDR-H2: YINPX₁NDGTFYNGX₂X₃X₄G (SEQ ID NO: 2), wherein X₁ is K or A, X₂ K or A, X₃ is F or V, and X₄ is K or Q, or YINPX₁NDGT, wherein X₁ is K or A (SEQ ID NO: 268); CDR-H3: FX₅YGX₆AY (SEQ ID NO: 3), wherein X₅ is N or Y, and X₆ s I or F, CDR-L1: RASQEISGYLS (SEQ ID NO: 4); CDR-L2: AASX₇X₈DX₉ (SEQ ID NO: 5), wherein X₇ is T or N, X₈ is R or L, and X₉ is S or T; and CDR-L3: VQYASYPWT (SEQ ID NO: 6).

### Example 5

### Expression and Purification of Anti-IL4R-mAb Clone B and I

[0549] Nucleotide sequences encoding full length Clone B and I heavy and light chain polypeptides with leader sequences (SEQ ID NOs 27, 28, 49, and 50) were chemically synthesized and cloned into separate expression vectors suitable for transfection into a CHO host cell. Clone B and Clone I vectors were transfected into separate CHO host cells and cultured. Clone B and Clone I antibodies were purified from the culture medium by single step Protein A column chromatography.

[0550] Thermostability of Clone B and I antibodies as a function of pH was measured by differential scanning fluorimetry (DSF). The melting temperature (Tm) of each antibody at the different pHs is listed in Table 4, below. Buffer and 12 μg of antibody were mixed together with 1× Protein thermal shift dye (Applied Biosystem, Catalog No. 4461146). A melting curve was performed with StepOne Real Time PCR System (Applied Biosystem, Catalog No. 4376357). The temperature was increased from 25° C. to 99° C. with a ramp rate of 1% according to the manufacturer's instructions. The data was analyzed by Protein Thermal Shift™ Software v1.0 (Applied Biosystem, Catalog No. 4466038) to determine the Tm, which was calculated as the highest value derived from taking the first derivative of the protein melting curve.

TABLE 4

| pH Tested | Assay buffer | Clone B Tm (° C.) | Clone I Tm (° C.) |
|---|---|---|---|
| 4.5 | 0.1M NaAc | 58.5 | 59.2 |
| 6 | 0.1M NaPO₄ | 65.1 | 65.6 |
| 7.5 | 0.1M NaPO₄ | 66.5 | 67.8 |
| 9 | 0.1M TrisHCl | 66.7 | 67.1 |

### Example 6

### Demonstration of Canine IL4R Binding Activity

[0551] Clone B and I antibodies each exhibited affinity to canine IL4R with kinetics potentially sufficient for therapeutic activity. The binding analysis was performed using an Octet Biosensor as follows. Briefly, canine IL4R-ECD_C-His6 (SEQ ID NO: 107) was biotinylated through amine chemistry. The free unreacted biotin was removed by extensive dialysis. Biotinylated canine IL4R-ECD_C-His6 was captured on streptavidin sensor tips. The association of either Clone B or I antibody and canine IL4R-ECD_C-His6 (25 μg/mL) was monitored for 600 seconds. Dissociation was monitored for 600 seconds. A buffer only blank curve was subtracted to correct for any drift. The data were fit to a 1:1 binding model using ForteBio™ data analysis software to determine the kₒₙ, k_{off}, and the Kd. The buffer for dilutions and all binding steps was 20 mM phosphate, 150 mM NaCl, pH 7.2. The Kd of Clone B antibody and canine IL4R-ECD_C-His6 was 2.03×10⁻⁹ M and of Clone I antibody and canine IL4R-ECD_C-His6 was 1.79×10⁻⁹ M.

[0552] An alternative binding assay was performed also using an Octet Biosensor. Canine IL4R-ECD_C-HuFc_His6 (SEQ ID NO: 109) was captured on anti-human Fc-bound sensor tips. The association of either Clone B or I antibody and canine IL4R-ECD_C-HuFc_His6 was monitored for 600 seconds. Dissociation was monitored for 600 seconds. The buffer for dilutions and all binding steps was 20 mM phosphate, 150 mM NaCl, pH 7.2. The Kd of Clone B antibody and canine IL4R-ECD_C-HuFc_His6 was about 10⁻¹⁰ M and of Clone I antibody and canine IL4R-ECD_C-HuFc_His6 was 2.75×10⁻¹⁰ M. The increased affinity observed with the second assay may be due to increased avidity of Clone B and I antibodies for canine IL4R-ECD_C-HuFc_His6 over canine IL4R-ECD_C-His6. In addition, amine conjugation may affect the affinity of canine IL4R-ECD_C-His6 to interact with Clone B and I antibodies.

### Example 7

### Clone B and I Antibodies Compete for the Same IL4R Epitope Group

[0553] Epitope binding analysis was performed using an Octet Biosensor. Canine IL4R-ECD_C-HuFc_His6 (SEQ ID NO: 109) was captured on anti-human Fc-bound sensor tips. The association of Clone B antibody (50 μg/mL) and canine IL4R-ECD_C-HuFc_His6 was monitored for 600 seconds. The complex-bound tips were washed briefly and then exposed to Clone I antibody (50 μg/mL). After the wash step and exposure to Clone I antibody, no further association for canine IL4R-ECD_C-HuFc_His6 was observed (FIG. 2A), suggesting that Clone B and I antibodies bind to same epitope group. The opposite binding assay was also performed. The association between Clone I antibody (50 μg/mL) and canine IL4R-ECD_C-HuFc_His6 captured on anti-human Fc-bound sensor tips was monitored for 600 seconds. The complex-bound tips were washed briefly and then exposed to Clone B antibody (50 μg/mL). After the wash step and exposure to Clone B antibody, no further association for canine IL4R-ECD_C-HuFc_His6 was observed (FIG. 2B), again suggesting that Clone B and Clone I antibodies bind to same epitope group.

### Example 8

### Clone B and Clone I Antibodies Block IL4 and IL13 Binding to IL4R

[0554] Various binding analyses of Clone B, Clone I, canine IL4, and canine IL13 ligands to canine IL4R were performed using an Octet Biosensor. Canine IL4R-ECD_C-HuFc_His6 (SEQ ID NO: 109) was captured on anti-human Fc-bound sensor tips. The association of Clone B or Clone I antibody (25 μg/mL) and canine IL4R-ECD_C-HuFc_His6 was monitored for 600 seconds. The complex-bound tips were washed briefly and then exposed to canine IL4_C-His6 (SEQ ID NO: 127; 50 μg/mL) or canine IL13_C-His6 (SEQ ID NO: 157; 50 μg/mL) and monitored for 600 seconds. Little to no binding of canine IL4 (FIG. 3A) or canine IL13 (FIG. 3B) was observed, suggesting that Clone B and I antibodies block the binding of canine IL4 and canine IL13 to canine IL4R.

[0555] The opposite binding assay was also performed. The association between canine IL4_C-His6 (SEQ ID NO: 127; 50 μg/mL) or canine IL13_C-His6 (SEQ ID NO: 157; 50 μg/mL) and canine IL4R-ECD_C-HuFc_His6 captured on anti-human Fc-bound sensor tips was monitored for 600 seconds. The complex-bound tips were washed briefly and then exposed to Clone B antibody (50 μg/mL) or Clone I antibody (50 μg/mL) and monitored for 600 seconds. Following IL4 and IL13 binding to IL4R (FIG. 3C and FIG. 3D, respectively), further association with Clone B or Clone I was observed. These results suggest that Clone B and Clone I each have a higher affinity for IL4R than either canine IL4 or canine IL13.

### Example 9

### Immunoreactivity of Clone B and I Antibodies to IL4R by Western Analysis

[0556] The ability of Clone B and I antibodies to recognize canine IL4R-ECD_C-HuFc_His6 (SEQ ID NO: 109) by Western blot was investigated. Purified canine IL4R-ECD_C-HuFc_His6 was separated by SDS-PAGE under reducing conditions (in the presence of DTT) or non-reducing conditions (absence of DTT). The proteins were transferred to a PVDF membrane and probed using either Clone B or I antibody followed by goat anti-mouse IgG-HRP. Immunoreactive positive signals with Clone B and I antibodies were only observed with samples under non-reducing conditions, suggesting that disulfide binding may be important for maintaining epitope conformation and that the epitope for Clone B and I antibodies may be discontinuous or conformational.

[0557] Cross-reactivity of Clone I antibody to feline, equine, murine, and human IL4R was also investigated. Canine IL4R-ECD_C-HuFc_His6 (SEQ ID NO: 109), feline IL4R-ECD_C-HuFc_His6 (SEQ ID NO: 111), equine IL4R-ECD_C-HuFc_His6 (SEQ ID NO: 113), murine IL4R-ECD_C-HuFc_His6 (SEQ ID NO: 115), and human IL4R-ECD_C-HuFc_His6 (SEQ ID NO: 117) (0.1 μg/lane) were each separated by SDS-PAGE under reducing (+DTT) or non-reducing (−DTT) conditions. The proteins were transferred to PVDF membranes and the blots were probed with Clone I antibody (0.3 μg/mL) and visualized by goat anti-mouse IgG-HRP (FIG. 4A). As a control, the blot was stripped and probed with goat anti-human IgG Fc-HRP to visualize the presence of the IL4R-ECD proteins (FIG. 4B). Clone I antibody immunoreacted with canine IL4R-ECD_C-HuFc_His6 and to a lesser extent with feline IL4R-ECD_C-HuFc_His6 under non-reducing conditions (FIG. 4A, lanes 5 and 1, respectively). Low background reactivity was observed with equine, murine, and human IL4R-ECD_C-HuFc_His6 fusion polypeptides (FIG. 4A, lanes 2, 3, and 4, respectively).

### Example 10

### Feline IL4R Binding Affinity

[0558] The immunoblot assay detected slightly reduced binding between Clone I and feline IL4R-ECD_C-HuFc_His6 compared to binding between Clone I and canine IL4R-ECD_C-HuFc_His6. This finding was consistent with in vitro binding affinity measured by Octet Biosensor. Biotinylated feline IL4R-ECD_C-HuFc_His6 (SEQ ID NO: 111) was captured on streptavidin sensor tips. The association of Clone I antibody (25 μg/mL) and feline IL4R-ECD_C-HuFc_His6 was monitored for 600 seconds. Dissociation was monitored for 600 seconds. A buffer only blank curve was subtracted to correct for any drift. The data were fit to a 1:1 binding model using ForteBio™ data analysis software to determine the kₒₙ, k_{off}, and the Kd. The buffer for dilutions and all binding steps was 20 mM phosphate, 150 mM NaCl, pH 7.2. The Kd of Clone I antibody and feline IL4R-ECD_C-HuFc_His6 was 1.1×10⁻⁹ M.

### Example 11

### Identification of Canine IL4R Binding Epitope for Clone I Antibody

[0559] The canine IL4R epitope that is recognized by Clone I antibody (and presumably also by Clone B antibody) was investigated. Since Clone I antibody exhibited a low background of cross reactivity with human IL4R-ECD, numerous hybrid proteins of canine IL4R ECD (SEQ ID NO: 99) and human IL4R ECD (SEQ ID NO: 103) sequences were designed with a leader sequence (SEQ ID NO: 132) and a C-terminal human Fc-His6 tag to facilitate canine IL4R epitope mapping. Canine and human ECD sequences were divided into three segments (A, B, and C) and six different hybrid polypeptide constructs were prepared based on those segments in the order of A to C (see FIG. 5A and Table 5, below).

TABLE 5

| | SEQ | | | |
|---|---|---|---|---|
| Hybrid | ID | Canine IL4R ECD | Human IL4R ECD | FIG. 4 |
| IL4R | NO: | segment(s) | segment(s) | Lane |
| Hybrid 1 | 133 | A (G1-N55) | B and C (N56-H209) | 3 |
| Hybrid 2 | 134 | B (R56-H109) | A and C | 4 |
| | | | (G1-N55, T110-H209) | |
| Hybrid 3 | 135 | C (P110-P204) | A and B (G1-H109) | 5 |
| Hybrid 4 | 136 | A and B (G1-H109) | C (T110-H209) | 6 |
| Hybrid 5 | 137 | B and C (R56-P204) | A (G1-N55) | 7 |
| Hybrid 6 | 138 | A and C (G1-N55, | B (N56-H109) | 8 |
| | | P110-P204) | | |

[0560] Plasmid constructs containing nucleotide sequences encoding each of Hybrid 1-6 polypeptides were transiently transfected into 293 cells and the supernatants concentrated 3-fold. Each fusion polypeptide was separated by SDS-PAGE under non-reducing (−DTT) conditions and the proteins transferred to a PVDF membrane. The blot was probed using Clone I antibody (FIG. 5B) or anti-human Fc antibody as a control (FIG. 5C). The presence of both canine IL4R ECD segments A and B gave the strongest signal (Hybrid 4, FIG. 5B, lane 6). Canine IL4R ECD segment A alone (Hybrid 1, FIG. 5B, lane 3) or with segment C (Hybrid 6, FIG. 5B, lane 8) gave appreciable signal, suggesting that segment A may contain the major epitope. Whereas segment B alone (Hybrid 2, FIG. 5B, lane 4) or with segment C (Hybrid 5, FIG. 5B, lane 7) gave a weaker signal, suggesting that segment B may contain an accessary (or minor) epitope.

[0561] Based on this information, additional hybrid proteins of canine IL4R ECD (SEQ ID NO: 99) and human IL4R ECD (SEQ ID NO: 103) sequences were designed with a leader sequence (SEQ ID NO: 132) and C-terminal human Fc-His6 tag to further localize the canine IL4R epitope(s). Segments A and B of canine and human ECD sequences were further divided and an additional eight hybrid polypeptide constructs (Hybrids 7-14) were prepared based on increasing amino acid residue number of either canine or human sequences (see FIG. 6A and Table 6, below).

TABLE 6

| | SEQ | | | |
|---|---|---|---|---|
| Hybrid | ID | Canine IL4R ECD | Human IL4R | FIG. 5 |
| IL4R | NO: | segment(s) | ECD segment(s) | Lane |
| Hybrid 7 | 139 | C31-P204 | G1-N30 | 3 |
| Hybrid 8 | 140 | G1-N30 and R56-P204 | C31-N55 | 4 |
| Hybrid 9 | 141 | G1-N30 and D42-P204 | C31-L41 | 5 |
| Hybrid 10 | 142 | G1-L41 and R56-P204 | V42-N55 | 6 |
| Hybrid 11 | 143 | G1-N55 and E72-P204 | N56-V71 | 7 |
| Hybrid 12 | 144 | G1-V71 and G90-P204 | S72-K89 | 8 |
| Hybrid 13 | 145 | G1-S89 and P110-P204 | G90-H109 | 9 |
| Hybrid 14 | 146 | G1-I67 and S95-P204 | D68-P94 | 10 |

[0562] Plasmid constructs containing nucleotide sequences encoding each of Hybrid 7-14 polypeptides were transiently transfected into 293 cells and the supernatants concentrated 3-fold. Each hybrid polypeptide was separated by SDS-PAGE under non-reducing (— DTT) conditions and the proteins transferred to a PVDF membrane. The blot was probed using Clone I antibody (FIG. 6B) or anti-human Fc antibody as a control (FIG. 6C). The presence of both the C-terminal half of segment A and the central part of segment B gave the strongest signals (FIG. 6B; Hybrids 7, 11, and 13; lanes 3, 7, and 9, respectively).

[0563] To further identify amino acid residues of the canine IL4R epitopes recognized by Clone I, multiple mutant canine IL4 ECD sequences carrying alanine mutations based on SEQ ID NO: 99 were designed with a leader sequence (SEQ ID NO: 132) and a C-terminal human Fc-His6 tag and expressed in 293 cells. The cell supernatants were concentrated 3-fold, separated by SDS-PAGE under non-reducing (— DTT) conditions, and transferred to a PVDF membrane. The blot was probed using Clone I antibody (FIG. 7B) or anti-human Fc antibody as a control (FIG. 7C). The results of the fine epitope mapping are summarized in Table 7, below. The results suggest that amino acids M44 and G45 of canine IL4R ECD (SEQ ID NO: 95) are involved in epitope binding.

TABLE 7

| Mutant | FIG. 7 | SEQ | Canine IL4R ECD | Was a decreased |
|---|---|---|---|---|
| IL4R | Lane | ID NO: | Substitution | signal observed? |
| Mutant 1 | 3 | 147 | A33T | No |
| Mutant 2 | 4 | 148 | M44A | Yes |
| Mutant 3 | 5 | 149 | G45A | Yes |
| Mutant 4 | 6 | 150 | N48A | No |
| Mutant 5 | 7 | 151 | S38A | No |
| Mutant 6 | 8 | 152 | D42A | No |
| Mutant 7 | 9 | 153 | H49A | No |

[0564] A three-dimensional model of a complex of canine IL4 (SEQ ID NO: 121), canine IL4R ECD (SEQ ID NO: 99) and canine IL13R ECD (SEQ ID NO: 161) was constructed (FIG. 8). Canine IL4R epitope 1 is identified in FIG. 8. Analysis of the study results described above, and three-dimensional protein modeling analysis suggests that Clones B and I bind to a first epitope residing within L41 and T50 of canine IL4R ECD (SEQ ID NO: 99) or feline IL4R ECD (SEQ ID NO: 100), such as within R36 and N55. For example, the first epitope may comprise the amino acid sequence of SEQ ID NO: 88, SEQ ID NO: 89, SEQ ID NO: 91, or SEQ ID NO: 92. In some embodiments, the first epitope comprises the amino acid sequence LX₁₀FMGSENX₁₁T, wherein X₁₀ is D or N and x₁₁ is H or R (SEQ ID NO: 85). In some embodiments, the first epitope comprises the amino acid sequence RLSYQLX₁₀FMGSENX₁₁TCVPEN, wherein X₁₀ is D or N and x₁₁ is H or R (SEQ ID NO: 86).

[0565] Analysis of the study results and three-dimensional protein modeling also suggests that Clones B and I bind to a second epitope within amino acids S64 and Q85 of canine IL4R ECD (SEQ ID NO: 99) or feline IL4R ECD (SEQ ID NO: 100). For example, the second epitope may comprise the amino acid sequence of SEQ ID NO: 90 or SEQ ID NO: 93. In some embodiments, the second epitope comprises the amino acid sequence SMX₁₂X₁₃DDX₁₄VEADVYQLX₁₅LWAGXQ, wherein X₁₂ is P or L, X₁₃ is I or M, X₁₄ is A or F, X₁₅ is D or H, and X₁₆ is Q or T (SEQ ID NO: 87).

### Example 12

### Expression and Purification of Chimeric, Caninized, and Felinized Antibodies

[0566] Clone B or I variable heavy chain polypeptides may be fused to the heavy chain constant region of a different animal species, such as a wild-type canine IgG-A, IgG-B, IgG-C, or IgG-D or a wild-type feline IgG-1a, IgG-1b, or IgG-2 Fc polypeptide (e.g., IgG Fc polypeptides comprising SEQ ID NO: 162, 163, 164, 165, 166, 167, 203, 204, 205, 206, 207, 227, 228, 229, 230, 237, 238, 239, or 240), or variants of such IgG Fc polypeptides (e.g., variant IgG Fc polypeptides comprising SEQ ID NO: 168, 169, 170, 171, 172, 173, 174, 175, 176, 177, 178, 179, 180, 181, 182, 183, 184, 185, 186, 187, 188, 189, 190, 191, 192, 193, 194, 195, 196, 197, 198, 199, 200, 201, 202, 208, 209, 210, 211, 212, 213, 214, 215, 216, 217, 218, 219, 220, 221, 222, 223, 224, 225, 226, 231, 232, 233, 234, 239, 240, 381, 382, 383, 384, 385, 386, 387, 388, 389, 390, 391, 392, 393, or 394). Exemplary amino acid sequences of chimeric heavy chains include SEQ ID NO: 51 (Clone B variable HC and canine IgG-B) and SEQ ID NO: 55 (Clone I variable HC and canine IgG-B). In addition, Clone B or I variable light chain polypeptides may be fused to the light chain constant region of a companion animal species, such as a wild-type canine or feline light chain constant region (e.g., SEQ ID NO: 235 or 241), or variants of such polypeptides (e.g., SEQ ID NO: 236 or 242). Exemplary amino acid sequences of chimeric light chains include SEQ ID NO: 52 (Clone B variable LC and canine κ light chain constant region) and SEQ ID NO: 56 (Clone I variable LC and canine κ light chain constant region).

[0567] Clone B and I variable heavy and variable light chains were caninized and felinized by searching and selecting proper canine and feline germline antibody amino acid sequences as a template for CDR grafting. The sequences were further optimized using 3-dimensional structural modeling. Examples of caninized and felinized variants of Clone B and I variable heavy and variable light chain polypeptides that were designed include SEQ ID NO 59, SEQ ID NO: 60, SEQ ID NO: 61, SEQ ID NO: 62, SEQ ID NO: 63, SEQ ID NO: 64, SEQ ID NO: 274, SEQ ID NO: 363, SEQ ID NO: 65, SEQ ID NO: 66, SEQ ID NO: 275, SEQ ID NO: 364, SEQ ID NO: 67, SEQ ID NO: 68, SEQ ID NO: 69, and SEQ ID NO: 70.

[0568] Caninized or felinized heavy chain polypeptides may be fused to the heavy chain constant region of a wild-type canine IgG-A, IgG-B, IgG-C, or IgG-D or a wild-type feline IgG-1a, IgG-1b, or IgG-2 Fc polypeptide (e.g., IgG Fc polypeptides comprising SEQ ID NO: 162, 163, 164, 165, 166, 167, 203, 204, 205, 206, 207, 227, 228, 229, 230, 237, 238, 239, or 240), or variants of such IgG Fc polypeptides (e.g., variant IgG Fc polypeptides comprising SEQ ID NO: 168, 169, 170, 171, 172, 173, 174, 175, 176, 177, 178, 179, 180, 181, 182, 183, 184, 185, 186, 187, 188, 189, 190, 191, 192, 193, 194, 195, 196, 197, 198, 199, 200, 201, 202, 208, 209, 210, 211, 212, 213, 214, 215, 216, 217, 218, 219, 220, 221, 222, 223, 224, 225, 226, 231, 232, 233, 234, 239, 240, 381, 382, 383, 384, 385, 386, 387, 388, 389, 390, 391, 392, 393, or 394). Exemplary amino acid sequences of a caninized or felinized variable heavy chain and a variant IgG Fc polypeptide include SEQ ID NOs: 71, 72, 75, 76, 79, 80, 82, 372, 373, 83, 374, and 375.

[0569] Caninized or felinized light chain polypeptides may be fused to the light chain constant region of a companion animal species, such as a wild-type canine or feline light chain constant region (e.g., SEQ ID NO: 235 or 241), or variants of such polypeptides (e.g., SEQ ID NO: 236 or 242). Exemplary amino acid sequences of a caninized or felinized variable light chain and a κ light chain constant region include SEQ ID NOs: 73, 74, 77, 78, 81, 84, 376, 377, and 378.

[0570] Nucleotide sequences encoding chimeric polypeptides of Clone B and I variable heavy chain fused to canine or feline IgG and Clone B and I variable light chain fused to canine or feline constant light chain were synthesized and cloned into expression vectors suitable for transfection into a CHO host cell. Nucleotide sequences encoding caninized and felinized Clone I polypeptides were also synthesized and cloned into expression vectors. Each pair of HC and LC nucleotide sequences was transfected into a CHO host cell. The cells were cultured and Clone B, Clone I, Chimeric B, and Chimeric I antibodies were purified from the culture medium by Protein A column chromatography.

[0571] Vectors may also be used to perform pilot-scale transfection in CHO-S cells using the FreestyleMax™ transfection reagent (Life Technologies). The supernatant is harvested by clarifying the conditioned media. Antibodies may be purified with a single pass Protein A chromatography step and used for further investigation.

[0572] Purified antibody preparations may be admixed with one or more pharmaceutically acceptable excipients and sterilized by filtration to prepare a pharmaceutical composition of the invention. Exemplary antibody preparations or pharmaceutical compositions may be administered to a dog or cat with an IL4R-induced condition, such as atopic dermatitis, allergic dermatitis, pruritus, asthma, psoriasis, scleroderma, or eczema in a therapeutically effective amount.

### Example 13

### Variant Canine IgG Fc Polypeptides for Increased Protein a Binding and/or Decreased Complement Binding and/or Decreased CD16 Binding

[0573] Purification of antibodies using Protein A affinity is a well-developed process. However, among four subtypes of canine IgG, only IgG-B Fc (e.g., SEQ ID NO: 163 or SEQ ID NO: 164) has Protein A binding affinity. Canine IgG-A Fc (e.g., SEQ ID NO: 162), IgG-C Fc (e.g., SEQ ID NO: 165 or SEQ ID NO: 166), and IgG-D Fc (e.g., SEQ ID NO: 167) have weak or no measurable Protein A binding affinity. Variant canine IgG-A Fc, IgG-C Fc, and IgG-D Fc polypeptides were designed for altered Protein A binding.

[0574] In addition, canine IgG-B Fc and IgG-C Fc have complement activity and bind to C1q, while canine IgG-A Fc and IgG-D Fc have weak or no measurable binding affinity to C1q. To potentially reduce the C1q binding and/or potentially reduce complement-mediated immune responses, variant canine IgG-B Fc and IgG-C Fc polypeptides were designed.

[0575] Furthermore, canine IgG-B Fc and IgG-C Fc have CD16 binding activity. To potentially reduce the binding of CD16 to IgG-B Fc and IgG-C Fc, and/or potentially reduce ADCC, variant canine IgG-B Fc and IgG-C Fc polypeptides were designed.

[0576] Table 8, below summarizes the Protein A and C1q binding characteristics of canine IgG Fc subtypes. Notably, none of the wild-type canine IgG Fc subtypes lacks C1q binding and binds Protein A.

TABLE 8

| Wild-type | Protein A | C1q | CD16 |
|---|---|---|---|
| Canine IgG Fc | Binding | Binding | Binding |
| IgG-A Fc | − | − | − |
| IgG-B Fc | + | + | + |
| IgG-C Fc | − | + | + |
| IgG-D Fc | − | − | − |

(−) denotes low or no measurable binding activity.

[0577] Two approaches were used to design variant canine IgG-A, IgG-C, and IgG-D Fc polypeptides for increased Protein A binding. For the first approach, variant canine IgG-A, IgG-C, and IgG-D Fc polypeptides were designed to have the same Protein A binding motif sequences as canine IgG-B Fc (e.g., SEQ ID NO: 163, SEQ ID NO: 165, and SEQ ID NO: 167, respectively). For the second approach, variant canine IgG-A Fc I(21)T/Q(207)H (SEQ ID NO: 169), variant canine IgG-C Fc I(21)T (SEQ ID NO: 181), and variant canine IgG-D Fc I(21)T/Q(207)H (SEQ ID NO: 194) were designed with one or two amino acid substitutions in the Protein A binding region to correspond with the canine IgG-B Fc sequence.

[0578] In addition, variant canine IgG-A Fc, IgG-C Fc, and IgG-D Fc polypeptides with increased Protein A binding may be prepared having one or more of the amino acid substitutions listed in Table 9.

TABLE 9
Variant Canine IgG Fc Amino Acid Substitutions* (Protein A+)

| Canine IgG-A Fc | Canine IgG-C Fc | Canine IgG-D Fc |
|---|---|---|
| (SEQ ID NO: 162) | (SEQ ID NO: 165) | (SEQ ID NO: 167) |
| Ile (21) Thr | Ile (21) Thr | Ile (23) Thr |
| Arg (23) Leu | Val (23) Leu | Arg (23) Leu |
| Thr (25) Ala | Thr (24) Ile | Thr (25) Ala |
| Glu (80) Gly | | Glu (80) Gly |
| Thr (205) Ala | | Gln (207) His |
| Gln (207) His | | |

*The amino acid positions listed are relative to the SEQ ID NO. indicated.

[0579] To potentially reduce the binding of C1q to canine IgG-B Fc and IgG-C Fc, and/or potentially reduce complement-mediated immune responses, variant canine IgG-B Fc and IgG-C Fc polypeptides may be prepared having an amino acid substitution of Lys with any amino acid except Lys at an amino acid position corresponding to position 93 of SEQ ID NO: 163 or of SEQ ID NO: 165, respectively. These amino acid substitutions were identified after analysis of the protein sequence and 3-D structure modeling of canine IgG-B Fc and IgG-C Fc compared to canine IgG-A Fc and IgG-D Fc, which are understood to not exhibit complement activity. For example, variant canine IgG-B Fc K(93)R (SEQ ID NO: 170) and variant canine IgG-C Fc K(93)R (SEQ ID NO: 182) may be prepared. Reduced binding between human C1q and a fusion protein comprising variant canine IgG-B Fc K(93)R was observed when compared to a fusion protein comprising wild-type canine IgG-B Fc.

[0580] To potentially reduce the binding of CD16 to IgG-B Fc and IgG-C Fc, and/or potentially reduce ADCC, variant canine IgG-B Fc and IgG-C Fc polypeptides may be prepared having one or more of the amino acid substitutions listed in Table 10. The amino acid substitution(s) were identified after analysis of the protein sequence and 3-D structure modeling of canine IgG-B and IgG-C compared to IgG-A and IgG-D, which are understood to not exhibit ADCC activity.

TABLE 10

| Original residue position* | | |
|---|---|---|
| Canine IgG-B Fc | Canine IgG-C Fc | |
| (SEQ ID NO: 163) | (SEQ ID NO: 165) | Substitution(s) |
| Met (5) | Leu (5) | Any amino acid |
| | | except original |
| | | residue, such as Pro |
| Asp (38) | Asp (38) | Any amino acid |
| | | except original |
| | | residue, such as |
| | | Gly |
| Pro (39) | Pro (39) | Any amino acid |
| | | except original |
| | | residue, such as |
| | | Arg |
| Lys (97) | Lys (97) | Any amino acid |
| | | except original |
| | | residue, such as Ile |
| Ala (98) | Ala (98) | Any amino acid |
| | | except original |
| | | residue, such as |
| | | Gly |

*The amino acid positions listed are relative to the SEQ ID NO. indicated.

[0581] Since wild-type canine IgG-C Fc lacks Protein A binding and has C1q binding, a double variant canine IgG-C Fc that binds Protein A and has reduced binding to C1q may be prepared by combining one or more of the amino acid substitutions listed in Table 9 with a K(93)R substitution or K(93)X substitution, wherein X is any amino acid except Lys. A double variant canine IgG-B Fc or double variant canine IgG-C Fc with reduced binding to C1q and reduced binding to CD16 may be prepared by combining one or more of the amino acid substitutions listed in Table 10 with a K(93)R substitution or K(93)X substitution, wherein X is any amino acid except Lys. A triple variant canine-IgG-C Fc that binds Protein A and has reduced binding to C1q and CD16 may be prepared by combining one or more of the amino acid substitutions listed in Table 9 and one or more of the amino acid substitutions listed in Table 10 with a K(93)R substitution or K(93)X substitution, wherein X is any amino acid except Lys.

[0582] The binding of any variant canine IgG Fc to Protein A, CD16, and/or C1q may be determined and compared to the binding of another IgG Fc to Protein A, CD16, and/or C1q (e.g., the corresponding wild-type canine IgG Fc, another wild-type or variant canine IgG Fc, or a wild-type or variant IgG Fc of another companion animal, etc.).

[0583] Binding analysis may be performed using an Octet biosensor. Briefly, the target molecule (e.g., Protein A, C1q, CD16, etc.) may be biotinylated and free unreacted biotin removed (e.g., by dialysis). The biotinylated target molecule is captured on streptavidin sensor tips. Association of the target molecule with various concentrations (e.g., 10 μg/mL) of IgG Fc polypeptide is monitored for a specified time or until steady state is reached. Dissociation is monitored for a specified time or until steady state is reached. A buffer only blank curve may be subtracted to correct for any drift. The data are fit to a 1:1 binding model using ForteBio™ data analysis software to determine the kₒₙ, k_{off}, and the K_{d}.

[0584] Exemplary variant canine IgG polypeptides for increased Protein A binding (e.g., for ease of purification), decreased C1q binding (e.g., for reduced complement-mediated immune responses), reduced CD16 binding (e.g., reduced antibody-dependent cell-mediated cytotoxicity), and/or increased stability include SEQ ID NOs: 169, 170, 171, 172, 173, 174, 175, 176, 177, 178, 179, 180, 181, 182, 183, 184, 185, 186, 187, 188, 189, 190, 191, 192, 193, and 194. Such variant canine IgG polypeptides may be incorporated with Clone B or I variable heavy chain sequences, caninized Clone B or I variable heavy chain sequences, or CDR sequences described in the above examples.

### Example 14

### Variant Feline IgG Fc Polypeptides for Decreased Complement Binding and/or Enhanced Hinge Disulfide Formation and/or Enhanced Recombinant Production

[0585] Each of the three subtypes of feline IgG, IgG1a Fc (SEQ ID NO: 203 or SEQ ID NO: 204), IgG1b Fc (SEQ ID NO: 205 or SEQ ID NO: 206), and IgG2 Fc (SEQ ID NO: 207) have Protein A binding affinity. However, only feline IgG2 Fc has weak or no measurable binding affinity to C1q, while feline IgG1a Fc, IgG1b Fc bind to C1q. To potentially reduce the C1q binding and/or potentially reduce complement-mediated immune responses, variant feline IgG1a Fc and IgG1b Fc polypeptides were designed.

[0586] Table 11, below summarizes the Protein A and C1q binding characteristics of feline IgG Fc subtypes. Notably, none of the wild-type equine IgG Fc subtypes lacks C1q binding and binds Protein A.

TABLE 11

| Wild-type | Protein A | C1q |
|---|---|---|
| Feline IgG Fc | Binding | Binding |
| IgG1a Fc | + | + |
| IgG1b Fc | + | + |
| IgG2 Fc | + | − |

(−) denotes low or no measurable binding activity.

[0587] To potentially reduce the binding of C1q to feline IgG1a Fc and IgG1b Fc, and/or potentially reduce complement-mediated immune responses, variant feline IgG1a Fc and IgG1b Fc polypeptides may be prepared having an amino acid substitution of Pro with any amino acid except Pro at an amino acid position corresponding to position 198 of SEQ ID NO: 203, SEQ ID NO: 204, SEQ ID NO: 205, or SEQ ID NO: 206. These amino acid substitutions were identified after analysis of the protein sequence and 3-D structure modeling of feline IgG1a Fc and IgG1b Fc compared to feline IgG2 Fc, which is understood to not exhibit complement activity. For example, variant feline IgG1 Fc polypeptides P(198)A (SEQ ID NOs: 209, 210, 212, and 213) may be prepared.

[0588] The binding of any variant feline IgG Fc to C1q may be determined and compared to the binding of another IgG Fc to C1q (e.g., the corresponding wild-type feline IgG Fc, another wild-type or variant feline IgG Fc, or a wild-type or variant IgG Fc of another companion animal, etc.). The binding assay described in Example 13 may be used.

[0589] Three-dimensional protein modeling analysis of several ortholog hinge structures was used to modify feline IgG hinges to enhance disulfide formation. To enhance disulfide formation at the feline IgG hinge, the hinge sequence may be modified by substituting lysine with proline at a position corresponding to position 16 of feline IgG1a (SEQ ID NO: 203 or SEQ ID NO: 204) (e.g., K16P), feline IgG1b (SEQ ID NO: 205 or SEQ ID NO: 206), or feline IgG2 (SEQ ID NO: 207) (e.g., K(16)P). Examples of amino acid sequences of variant feline IgG polypeptides having a modified hinge include SEQ ID NO: 208, SEQ ID NO: 211, and SEQ ID NO: 215.

[0590] To increase disulfide formation at the feline IgG2 hinge, the hinge sequence may be modified by substituting an amino acid with cysteine. For example, a variant feline IgG2 Fc (SEQ ID NO: 214) having a modified hinge was prepared by substituting Gly with Cys at an amino acid position corresponding to position 14 of SEQ ID NO: 207.

[0591] Three-dimensional protein modeling was used to design feline variant IgG Fc polypeptides comprising sequences from the hinge region from a different IgG isotype for enhanced recombinant production and improved hinge disulfide formation. Variant feline IgG2 Fc polypeptides may be prepared that comprise sequences from the hinge region of feline IgG1a or IgG1b (e.g., SEQ ID NO: 216). Levels of recombinant production of variant IgG Fc polypeptides and/or levels of hinge disulfide formation may be determined and compared to that of another IgG Fc by SDS-PAGE analysis under reducing and non-reducing conditions (e.g., the corresponding wild-type IgG Fc of the same or different isotype, or a wild-type or variant IgG Fc of another companion animal, etc.).

[0592] Exemplary variant feline IgG polypeptides for decreased C1q binding (e.g., for reduced complement-mediated immune responses) and/or enhanced hinge disulfide formation and/or enhanced recombinant production include SEQ ID NOs: 208, 209, 210, 211, 212, 213, 214, 215, and 216. Such variant feline IgG polypeptides may be incorporated with Clone B or I variable heavy chain sequences, felinized Clone B or I variable heavy chain sequences, or CDR sequences described in the above examples.

### Example 15

### Variant Canine, Feline, and Equine IgG Fc Polypeptides for Bispecific Antibodies

[0593] To enable the preparation of a bispecific canine, feline, or equine antibody using a knob-in-hole heterodimerization approach, pairing of variant canine IgG Fc polypeptides, variant feline IgG Fc polypeptides, and variant equine IgG Fc polypeptides was investigated. Bispecific antibodies combine specificities of two antibodies against two different targets. First, heavy chain pairing was designed by introducing CH3 interfacing mutations so that one chain comprises a bulky amino acid (knob) and the other chain comprises smaller amino acids in the same general location (hole). Furthermore, to facilitate a heavy chain to specifically pair with its intended light chain, interface amino acids between CH1 and the light chain may be mutated to be complementary in shape and charge-charge interaction.

[0594] An amino acid substitution of tryptophan to tyrosine at a position corresponding to position 138 of canine IgG-A (SEQ ID NO: 162), at a position corresponding to position 137 of canine IgG-B Fc (SEQ ID NO: 163), at a position corresponding to position 137 of canine IgG-C Fc (SEQ ID NO: 165), or at a position corresponding to position 138 of canine IgG-D Fc (SEQ ID NO: 167) (T138W or T137W) can be introduced as a knob. Examples of amino acid sequences of a first variant canine IgG-A Fc, IgG-B Fc, IgG-C Fc, and IgG-D Fc are SEQ ID NO: 195, SEQ ID NO: 196, SEQ ID NO: 197, and SEQ ID NO: 198, respectively.

[0595] An amino acid substitution of threonine to serine at a position corresponding to position 138 and of leucine to alanine at a position corresponding to position 140 of canine IgG-A (SEQ ID NO: 162) or of IgG-D (SEQ ID NO: 167) (T138S, L140A), or of threonine to serine at a position corresponding to position 137 and of leucine to alanine at a position corresponding to position 139 of canine IgG-B Fc (SEQ ID NO: 163) or of IgG-C(SEQ ID NO: 165) (T137S, L139A) can be introduced as a hole. Examples of amino acid sequences of a second variant canine IgG-A Fc, IgG-B Fc, IgG-C Fc, and IgG-D Fc are SEQ ID NO: 199, SEQ ID NO: 200, SEQ ID NO: 201, and SEQ ID NO: 202.

[0596] An amino acid substitution of alanine to leucine at a position corresponding to position 24 and of serine to asparagine at a position corresponding to position 30 of a canine IgG-A CH1 (SEQ ID NO: 227), canine IgG-B CH1 (SEQ ID NO: 228), canine IgG-C CH1 (SEQ ID NO: 229), or canine IgG-D CH1 (SEQ ID NO: 230) (A24L, 530D) may be introduced. Examples of amino acid sequences of a variant canine IgG-A CH1, IgG-B CH1, IgG-C CH1, and IgG-D CH1 are SEQ ID NO: 231, SEQ ID NO: 232, SEQ ID NO: 233, and SEQ ID NO: 234.

[0597] An amino acid substitution of a phenylalanine to alanine at a position corresponding to position 11 and of serine to arginine at a position corresponding to position 22 of a canine κ constant region (SEQ ID NO: 235) (F11A, S22R) may be introduced. An example of an amino acid sequence of a variant canine κ constant region is SEQ ID NO: 236.

[0598] An amino acid substitution of threonine to tryptophan at a position corresponding to position 154 of feline IgG1a Fc (SEQ ID NO: 203 or SEQ ID NO: 204), feline IgG1b Fc (SEQ ID NO: 205 or SEQ ID NO: 206), or of feline IgG2 (SEQ ID NO: 207) (T154W) can be introduced as a knob. Examples of amino acid sequences of a first variant feline IgG2 Fc, IgG1a Fc, and IgG1b Fc are SEQ ID NO: 217, SEQ ID NO: 218, SEQ ID NO: 219, SEQ ID NO: 220, and SEQ ID NO: 221.

[0599] An amino acid substitution of threonine to serine at a position corresponding to position 154 and of leucine to alanine at a position corresponding to position 156 of feline IgG1a (SEQ ID NO: 203 or SEQ ID NO: 204), feline IgG-b Fc (SEQ ID NO: 205 or SEQ ID NO: 206), or feline IgG2 Fc (SEQ ID NO: 207) (T154S, L156A) can be introduced as a hole. Examples of amino acid sequences of a second variant feline IgG2 Fc, IgG1a Fc, and IgG1b Fc are SEQ ID NO: 222, SEQ ID NO: 223, SEQ ID NO: 224, SEQ ID NO: 225, and SEQ ID NO: 226.

[0600] An amino acid substitution of alanine to leucine at a position corresponding to position 24 and of serine to asparagine at a position corresponding to position 30 of feline IgG1 CH1 (SEQ ID NO: 237), or an amino acid substitution of alanine to leucine at a position corresponding to position 24 and of serine to asparagine at a position corresponding to position 29 of feline IgG2 CH1 (SEQ ID NO: 238) may be introduced. Examples of amino acid sequences of a variant feline IgG1 CH1 and IgG2 CH1 are SEQ ID NO: 239 and SEQ ID NO: 240.

[0601] An amino acid substitution of a phenylalanine to alanine at a position corresponding to position 11 and of serine to arginine at a position corresponding to position 22 of a feline κ constant region (SEQ ID NO: 241) (F11A, S22R) may be introduced. An example of an amino acid sequence of a variant feline κ constant region is SEQ ID NO: 242.

[0602] An amino acid substitution of threonine to tryptophan at a position corresponding to position 130 of equine IgG1 Fc (SEQ ID NO: 247), of equine IgG2 Fc (SEQ ID NO: 248), of equine IgG3 Fc (SEQ ID NO: 249), of equine IgG4 Fc (SEQ ID NO: 250), of equine IgG5 Fc (SEQ ID NO: 251), of equine IgG6 Fc (SEQ ID NO: 252), or of equine IgG7 Fc (SEQ ID NO: 253) (T130W) can be introduced as a knob. Examples of amino acid sequences of a first variant equine IgG1 Fc, IgG2 Fc, IgG3 Fc, IgG4 Fc, IgG5 Fc, IgG6 Fc, and IgG7 Fc are SEQ ID NO: 254, SEQ ID NO: 255, SEQ ID NO: 256, SEQ ID NO: 257, SEQ ID NO: 258, SEQ ID NO: 259, and SEQ ID NO: 260, respectively.

[0603] An amino acid substitution of threonine to serine at a position corresponding to position 130 and of leucine to alanine at a position corresponding to position 132 of equine IgG1 Fc (SEQ ID NO: 247), of equine IgG2 Fc (SEQ ID NO: 248), of equine IgG3 Fc (SEQ ID NO: 249), of equine IgG4 Fc (SEQ ID NO: 250), of equine IgG5 Fc (SEQ ID NO: 251), of equine IgG6 Fc (SEQ ID NO: 252), or of equine IgG7 Fc (SEQ ID NO: 253) (T130W) can be introduced as a hole. Examples of amino acid sequences of a second variant equine IgG1 Fc, IgG2 Fc, IgG3 Fc, IgG4 Fc, IgG5 Fc, IgG6 Fc, and IgG7 Fc are SEQ ID NO: 261, SEQ ID NO: 262, SEQ ID NO: 263, SEQ ID NO: 264, SEQ ID NO: 265, SEQ ID NO: 266, and SEQ ID NO: 267, respectively.

[0604] The above described approach may be used to prepare bispecific antibodies against IL4R and other targets, such as IL17, IL31, TNFα, CD20, CD19, CD25, IL4, IL13, IL23, IgE, CD11α, IL6R, α4-Intergrin, IL12, IL1β, or BlyS. For example, a bispecific antibody against canine IL4R and canine IL31 may be prepared with the amino acid sequences of SEQ ID NO: 243 (caninized Clone I variable HC v2 and variant IgG-B Fc C1q-, CD16-with bispecific knob), SEQ ID NO: 244 (caninized Clone I variable LC v2 and variable canine κ constant region), SEQ ID NO: 245 (caninized anti-canine IL31 Clone M14 variable HC and variant canine IgG-B Fc C1q-, CD16-with bispecific hole), and SEQ ID NO: 246 (caninized anti-canine IL31 Clone M14 variable LC and canine κ constant region).

### Example 16

### Identification of Additional Mouse Monoclonal Antibodies that Bind to Canine IL4R

[0605] Mouse monoclonal antibodies were identified using standard immunization using canine IL4R extracellular domains produced by 293 cells as the immunogen. Different adjuvants were used during immunizations (Antibody Solutions, Sunnyvale, CA) and monoclonal antibodies were obtained through standard hybridoma technology. Enzyme linked immunosorbent assay (ELISA) was developed to screen the clones that produce canine IL4R binding antibodies. First canine IL4R was biotinylated and then it was introduced to streptavidin-coated wells. Immunized serum was then added to the wells followed by washing and detection with HRP-conjugated anti-mouse antibodies. The presence of canine IL4R binding antibodies developed a positive signal. Over 100 ELISA-positive clones with high binding signals were identified.

[0606] Furthermore, a neutralization (canine IL4-blocking) ELISA was performed. Four clones were identified that their binding to canine IL4R can be inhibited by canine IL4. Binding of canine IL4 to canine IL4R was inhibited by four clones: M3, M5, M8 and M9.

[0607] The four mouse antibodies were purified from the hybridoma cell cultures and their affinities to canine IL4R were measured using biosensor (ForteBio OctetRed). Biotinylated canine IL4R was bound to the streptavidin sensor tip. The Kds of the 4 candidates were all less than 10 nM.

### Example 17

### Identification of VH and VL Sequences of M3, M5, M8, and M9

[0608] Hybridoma cells producing M3, M5, M8 and M9 were pelleted. RNA was extracted and oligonucleotide primers for amplifying mouse immunoglobulin (Ig) variable domains were used to obtain cDNA using standard techniques. The variable heavy chain (VH) and variable light chain (VL) of each of the four clones were determined (SEQ ID NO: 292 (M3 VH), SEQ ID NO: 293 (M3 VL), SEQ ID NO: 308 (M5 VH), SEQ ID NO: 309 (M5 VL), SEQ ID NO: 324 (M8 VH), SEQ ID NO: 325 (M8 VL), SEQ ID NO: 340 (M9 VH), SEQ ID NO: 341 (M9 VL).

### Example 18

### Expression and Purification of Murine-Canine Chimeric Antibodies from CHO Cells

[0609] DNA sequences encoding a chimeric antibody were designed for a fusion of murine VH and murine VL to canine constant heavy chain IgG-B and canine constant light chain (kappa). The nucleotide sequences were synthesized chemically and inserted into an expression vector suitable for transfection into a CHO host cell. After transfection into CHO cells, the light chain or heavy chain protein or both were secreted from the cell. All four chimeric canine IgG-B were purified by single step Protein A column chromatography. Their affinities to canine IL4R were confirmed to be <10 nM using biosensor (ForteBio OctetRed).

### Example 19

### Caninization and Expression from CHO Cells

[0610] Murine (M3, M9) VH and VL were caninized by searching and selecting proper canine germline antibody sequences as a template for CDR grafting, followed by protein modeling. Caninized variable light chain M3 (SEQ ID NO: 344) and caninized variable light chain M9 (SEQ ID NO: 347) were fused to canine CL kappa (resulting in SEQ ID NOs: 350 and 353, respectively) Caninized variable heavy chains of M3 (SEQ ID NO: 342 and SEQ ID NO: 343) and caninized variable heavy chains of M9 (SEQ ID NO: 344 and SEQ ID NO: 345) were fused to variant canine IgG-B resulting in SEQ ID NOs 348, SEQ ID NO: 349, SEQ ID NO: 351, and SEQ ID NO: 352, respectively). The heavy and light chains were readily expressed and purified in a single step with a protein A column.

[0611] The caninized antibodies expressed well and maintained binding affinity to canine IL4R of ≤1 nM.

### Example 20

### Development of Canine IL4R Cell-Based Signaling Assay

[0612] Canine DH82 cells, a canine macrophage-like cell line derived from Malignant histiocytosis was purchased from ATCC (CRL10389), were seeded at 10e5 cells/well in 96-well plates and incubated at 37° C., 5% CO₂ overnight (in 15% FBS D-MEM as recommended by ATCC). Serum starvation and antibody pre-incubation of cells were done by replacing medium in each well with serial diluted anti-IL4R or hybridoma supernatant preparations in D-MEM without FBS for 1 hour at 5% CO₂, 37° C. Then, canine IL4 cytokine (RnD AF754) was added at 1 ng/mL (final concentration) to each well for 15 min at 5% CO₂, 37° C. Twenty microliters of stop solution (M-per Thermo Fisher #78501) was added each well. The IL4-inducible STAT6 phosphorylation in each well was assayed by anti-phospho-STAT6 (RnD MAB3717) western blotting.

[0613] M3, M8 and M9 mouse antibodies inhibited STAT6 phosphorylation as assessed by anti-phospho STAT6 Western blot.

### Example 21

### Identification of M3, M8 and M9 Canine IL4R Binding Epitopes

[0614] Since M3, M8 and M9 did not recognize human IL4R based on Western blot, yet strongly react to canine IL4R, combinations chimeric canine-human IL4R fusion molecules were made and expressed to identify the minimal canine segment(s) to which each antibody binds.

[0615] FIG. 9A illustrates the canine/human IL4R ECD hybrid polypeptides used for canine IL4R epitope mapping analyses (the same hybrid constructs used in the epitope mapping of Example 11, above). FIG. 9B summarizes the western blotting analysis in which canine IL4R ECD, human IL4R ECD, and the different canine/human IL4R ECD hybrid polypeptides were probed with M3, M8, and M9 antibodies. NR in the table represents that the antibody was not reactive to the hybrid IL4R ECD in the respective western blot indicating that the canine IL4R sequences replaced by human IL4R sequences are important for antibody binding (epitopes).

[0616] M3 was determined to bind an epitope having the sequence DFMGSENHTCVPEN (SEQ ID NO: 354). M8 was determined to bind to a first epitope having the sequence GSVKVLHEPSCFSDYISTSVCQWKMDHPTNCSA (SEQ ID NO: 355) and a second epitope having the sequence REDSVCVCSMPI (SEQ ID NO: 356). M9 was determined to bind to an epitope having the sequence REDSVCVCSMPIDDAVEADV (SEQ ID NO: 357).

### Example 22

### Screening Variant Canine IgG-B Polypeptides with Enhanced Canine FcRn/B2M Binding

[0617] Canine FcRn with a poly-His tag (SEQ ID NO: 379) and canine B2M (SEQ ID NO: 380) heterodimer complex was transiently expressed in HEK cells and purified using Ni-NTA chromatography.

[0618] Fast Screening for Expression, Biophysical Properties and Affinity (FASEBA) of canine IgG-B Fc phage libraries was performed. Briefly, the open reading frame of canine IgG-B Fc polypeptide was subcloned into plasmid pFASEBA. Based on three-dimensional protein modeling of the canine IgG-B/canine FcRn/canine B2M complex, twelve amino acid positions of canine IgG-B were identified as being potentially involved in the binding between IgG-B and FcRn/B2M. The twelve positions of canine IgG-B identified were Thr(21), Leu(22), Leu(23), Ile(24), Ala(25), Thr (27), Gly (80), His (81), Gln (82), Leu (85), Met (201), and Asn (207) of SEQ ID NO: 163 or SEQ ID NO: 164.

[0619] Twelve single site NNK mutation libraries of canine IgG-B Fc were prepared such that each library should have included variant IgG-B Fc polypeptides having each of the 20 possible amino acids substituted at each of the twelve sites. Each phage library was panned against canine FcRn/B2M complex at pH 6.0. After three rounds of panning, a total of 53 Fc phage clones were identified as potentially having enhanced FcRn/B2M binding and the mutations were identified by sequencing.

[0620] Single E. coli colonies expressing each of the 53 variant canine IgG-B Fc polypeptides with an SASA tag were cultured and induced to express the Fc polypeptides. Cell culture media containing the variant canine IgG-B Fc polypeptides was exposed to immobilized BSA either on a plate or a Biacore chip. The plates or chips with bound variant canine IgG-B Fc polypeptides were exposed to soluble canine FcRn/B2M complex to screen for slow off rate (koff) at pH 6. Each variant IgG-B Fc polypeptide exhibiting a slower koff with canine FeRn/B2M complex compared to wildtype IgG-B Fc polypeptide was identified. Four lead variant canine IgG-B polypeptides were identified: L(23)Y (SEQ ID NO: 382; “Y00”); L(23)F (SEQ ID NO: 381; “F00”); L(23)M; and L(23)S.

[0621] The koff of each of the lead variant canine IgG-B polypeptides was further investigated. Biotinylated canine FcRn/B2M complex was immobilized on a Biacore chip and exposed to each variant canine IgG-B polypeptide as an analyte using a Biacore T200 at pH 6.0. The koff (1/s) for wild-type canine IgG-B Fc polypeptide was 1.22×10⁻¹; the koff (1/s) for variant canine IgG-B Fc polypeptide L(23)Y (“Y00”) was 1.38×10⁻²; the koff (1/s) for variant IgG-B Fc polypeptide L(23)F (“F00”) was 6.31×10⁻² and 8.47×10⁻²; the koff (1/s) for variant canine IgG-B polypeptide L(23)M was 1.26×10⁻¹; and the koff (1/s) for variant canine IgG-B polypeptide L(23)S was 2.41×10⁻¹.

[0622] Binding analysis was performed using a Biacore T200. Briefly, the lead variant canine IgG-B Fc polypeptides with an SASA tag were each immobilized to a Series S Sensor Chip CM5. Association of each variant IgG-B Fc polypeptide with various concentrations of canine FcRn/B2M complex (12.5, 25, 50, 100, and 200 nM) was monitored at 25° C. until steady state was reached. A running buffer of 10 mM HEPES, 500 mM NaCl, 3 mM EDTA, 0.005% Tween-20, pH 6.0 was used. A buffer only blank curve was used as a control. The results are presented in FIGS. 10-14. The steady state Kd for wild-type canine IgG-B Fc polypeptide was 1.25×10⁻⁶ (FIG. 10); the steady state Kd for variant canine IgG-B Fc polypeptide L(23)Y (“Y00”) was 1.13×10⁻⁷ (FIG. 11); the steady state Kd for variant canine IgG-B Fc polypeptide L(23)F (“F00”) was 3.67×10⁻⁷ (FIG. 12); and the steady state Kd for variant canine IgG-B Fc polypeptide L(23)M was 4.06×10⁻⁷ (FIG. 13); and the steady state Kd for variant canine IgG-B Fc polypeptide YTE was 8.62×10⁻⁸ (FIG. 14).

### Example 23

### Phe Mutation in Canine IgG Enhances Canine FcRn Interaction

[0623] The affinity of variant canine Fc polypeptides for FcRn was evaluated in the context of a chimeric antibody. Antibody variable light chains fused to canine kappa light chain and variable heavy chains fused to variant canine IgG-A Fc polypeptides comprising SEQ ID NO: 383 (F00; Protein A+; C1q−; CD16−) or SEQ ID NO: 384 (Protein A+; C1q+; CD16+) and to variant canine IgG-D Fc polypeptides comprising SEQ ID NO: 385 (F00; Protein A+; C1q−; CD16−), or SEQ ID NO: 386 (Protein A+; C1q+; CD16+) were expressed.

[0624] The binding analysis was performed using a biosensor OctetRed as follows. Briefly, biotinylated TNFα was captured on streptavidin sensor tips. The association of antibody at 20 μg/mL was bound to TNFα. The complex was then used to bind to canine FcRn (50 μg/mL) at pH 6.0. Dissociation was performed at pH 7.2.

[0625] The Phe mutation enhanced canine FcRn binding at low pH (pH6.0, 20 mM NaCitrate, 140 mM NaCl), as illustrated by the binding profiles of chimeric variant canine IgG-A “F00” antibody (FIG. 15, A) and IgG-D “F00” antibody (FIG. 15, B) compared to chimeric variant canine IgG-A without the Phe mutation (FIG. 15, C) and IgG-D without the Phe mutation (FIG. 15, D). The chimeric variant canine IgG-A and IgG-D antibodies with the Phe mutation (FIG. 15, A and B) exhibited enhanced association with canine FcRn at low pH (pH 6.0) and fast dissociation at neutral pH (PBS pH7.2). A similar enhanced binding profile was also observed with chimeric variant canine IgG-B “F00” antibody.

### Example 24

### Pharmacokinetics of Phe Mutation in Canine IgG

[0626] Pharmacokinetics analysis was performed using Sprague Dawley rats. The rats were subcutaneously administered with 2 mg/kg of chimeric variant canine IgG-A “F00” antibody and chimeric variant canine IgG-A without the Phe mutation (two rats per group). Serum samples were collected from the rats at pre-injection and at 0.5, 1, 6, 24, 48, 72, 168, 216, and 336 hours post injection. The canine chimeric antibody concentrations in the serum samples were determined by ELISA, as follows.

[0627] Capture antibody (1 μg/mL in PBS) was coated on a 96-well Maxisorp plate with 100 μl in each well. The plate was incubated overnight at 4° C. and washed five times with PBST (PBS containing 0.05% Tween-20). Each well was blocked with 200 μl 5% BSA in PBST and the plate incubated for 1 hour at room temperature. The plate was washed five times with PBST. Dilutions of control antibody (1,000 ng/mL to 0.1 ng/mL) were added to the plate in duplicate and along with a blank well containing no control antibody were used to generate a standard curve. The serum samples were prepared by 10-fold, 20-fold, and 40-fold dilutions in 5% BSA-PBST and added to the plate. The plate was incubated at room temperature for 1 hour and washed 5 times with PBST. 100 μl HRP-conjugated antibody (Bio-Rad, catalog no. HCA204P) was added to each well at 0.25 μg/mL in 5% BSA-PBST. The plate was incubated for 1 hour at room temperature and washed 5 times with PBST. 100 μl QuantaBlu (Thermo Scientific, catalog no. 15169) was added to each well. The fluorescence was measured after 10⁻¹⁵ minutes incubation at 325 nm/420 nm (emission/excitation). The titer of anti-TNFα in the serum samples was calculated against the standard curve.

[0628] The AUC_{0-336 h} for IgG-A was 150970, while IgG-A “F00” was 848924 ng/mL*hr (FIG. 16). The terminal half-life was estimated to be 33 hours and 152 hours, respectively. Thus, the single Phe mutation significantly improved the pharmacokinetic profile of the antibody in rat.

### Example 25

### Phe Mutation in Canine, Feline, and Equine IgG Fcs

[0629] The interaction between the Phe mutation in canine IgG-A, IgG-B, IgG-C, and IgG-D Fc and FcRn was modeled using three-dimensional protein structure analysis. The aromatic side chain of Phe appears to have a hydrophobic interaction with canine FcRn at the Pro hydrophobic ring (π-CH) of the “WPE” motif. In addition, the Phe hydrophobic side chain may be in direct contact with the Glu side chain next to the Pro of the same “WPE” motif. This interaction may have energy penalty if the Glu side chain is deprotonated to be negative charged, such as at a neutral pH. Thus, some level of protonation of the Glu residue may be required to minimize the aromatics to Glu-H interaction. That may explain why the interaction between variant IgGs having the Phe mutation and FcRn is reduced at neutral pH. Based on protein structure analysis, the interaction appears to be conserved among canine IgG-A, IgG-B, IgG-C, and IgG-D Fc.

[0630] Furthermore, the interactions between a Phe mutation in feline IgG1a and IgG2 Fc were modeled when complexed with feline FcRn. The same interactions observed with the canine IgG Fcs appeared to be conserved with the feline IgG Fcs.

[0631] The interactions between a Phe mutation in equine IgG1, IgG2, IgG3, IgG4, IgG5, IgG6, and IgG7 Fc in complex with equine FcRn were also modeled. The same interactions appeared to be maintained with the equine IgG Fcs.

### Example 26

### Other Exemplary Variant Canine IgG Fcs Enhance Canine FcRn Interaction

[0632] The affinity of additional variant canine Fc polypeptides for FcRn was evaluated in the context of a chimeric antibody. Antibody variable light chain fused to canine kappa light chain and variable heavy chain sequences fused to wild-type IgG-B Fc polypeptide (comprising SEQ ID NO: 163), variant canine IgG-B Fc polypeptide 0Y0 (comprising SEQ ID NO: 387), variant canine IgG-B Fc polypeptide 0YH (comprising SEQ ID NO: 388), variant canine IgG-B Fc polypeptide 0YY (comprising SEQ ID NO: 389), and variant canine IgG-B Fc polypeptide 00Y (comprising SEQ ID NO: 390) were expressed.

[0633] The binding analysis was performed using a biosensor OctetRed as follows. Briefly, biotinylated target was captured on streptavidin sensor tips. The association of antibody at 20 μg/mL was bound to the biotinylated target. The complex was then used to bind to canine FcRn (50 μg/mL) at pH 6.0. Dissociation was performed at pH 7.2.

[0634] Each of the chimeric variant canine IgG-B antibodies exhibited enhanced binding to canine FcRn at pH 6.0 compared to the chimeric wild-type canine IgG-B antibody and each had an appreciable rate of dissociation at neutral pH (FIG. 17).

### Example 27

### Variant Canine IgG Fcs Extend Half-Life of Antibodies In Vivo in Canine

[0635] In vivo half-life of variant canine Fc polypeptides for FcRn was evaluated in the context of a chimeric antibody. Antibody variable light chain fused to canine kappa light chain and variable heavy chains fused to wild-type IgG-B Fc polypeptide (comprising SEQ ID NO: 163), variant canine IgG-B Fc polypeptide YTE (comprising SEQ ID NO: 391), variant canine IgG-B Fc polypeptide 0Y0 (comprising SEQ ID NO: 387), variant canine IgG-B Fc polypeptide F00 (comprising SEQ ID NO: 381), variant canine IgG-B Fc polypeptide 0YH (comprising SEQ ID NO: 388), and variant canine IgG-B Fc polypeptide Y00 (comprising SEQ ID NO: 382) were expressed and purified to 40 mg/mL in PBS, pH7.2.

[0636] Canine pharmacokinetics were performed at Absorption Systems California, LLC. Male beagles (˜8-14 kg) were obtained from Marshall Bioresources, North Rose, New York. A total of 12 dogs were used for study with n=2 dogs per group. The six antibodies were subcutaneously administered to the dogs at 4 mg/Kg. Serum samples were collected at pre-injection and at 6, 24, 48, 72, 96, 120, 144, 168, 216, 264, 336, 504 and 672 hours post-injection. The canine chimeric antibody concentrations were determined by ELISA as described. The Cp between time at 144 hour and 336 hour was transformed to Ln [Cp], then fit to linear equation in the form of Ln[Cp]ₜ=−k*t+Ln[Cp]_{144 h}. The terminal half-life was then calculated from slope k, as listed in Table 12, below. The 0Y0, F00, 0YH, and Y00 mutations in canine IgG-B Fc greatly improved the half-life of the antibody in vivo in dogs.

TABLE 12
Effect of variant canine IgG Fcs on antibody half-life in dog

| Dog | Half-life (days) |
|---|---|
| WT 1 | 13 |
| WT 2 | 13 |
| YTE 1 | *NR |
| YTE 2 | 15 |
| 0Y0 1 | *NR |
| 0Y0 2 | 28 |
| F00 1 | *NR |
| F00 2 | 23 |
| 0YH 1 | 22 |
| 0YH 2 | 23 |
| Y00 1 | 33 |
| Y00 2 | 39 |

*NR: result was not reliable

1.-15. (canceled)

16. An isolated antibody that binds to canine IL4R or feline IL4R, wherein the antibody comprises a heavy chain comprising:
a) a CDR-H1 sequence having at least 85%, at least 90%, at least 95%, at least 98%, or 100% sequence identity to the amino acid sequence of GYTFTSYVMX₁ (SEQ ID NO: 1), wherein X₁ is H or N;
b) a CDR-H2 sequence having at least 85%, at least 90%, at least 95%, at least 98%, or 100% sequence identity to the amino acid sequence of YINPX₂NDGTFYX₃GX₄X₅X₆G (SEQ ID NO: 2), wherein X₂ is K, A, or N, X₃ is N or A, X₄ is K or A, X₅ is F or V, and X₆ is K or Q, or YINPX₂NDGT (SEQ ID NO: 268), wherein X₂ is K, A, or N; and
c) a CDR-H3 sequence having at least 85%, at least 90%, at least 95%, at least 98%, or 100% sequence identity to the amino acid sequence of FX₇YGX₈AY (SEQ ID NO: 3), wherein X₇ is N or Y, and X₈ s I or F; and
wherein the antibody comprises a variant canine or feline IgG Fc polypeptide capable of binding to neonatal Fc receptor (FcRn) with an increased affinity relative to the wild-type Fc polypeptide.

17. The isolated antibody of claim 16, comprising a heavy chain comprising:
a) a CDR-H1 sequence having at least 85%, at least 90%, at least 95%, at least 98%, or 100% sequence identity to the amino acid sequence of GYTFTSYVMX₁ (SEQ ID NO: 1), wherein X₁ is H or N;
b) a CDR-H2 sequence having at least 85%, at least 90%, at least 95%, at least 98%, or 100% sequence identity to the amino acid sequence of YINPX₂NDGTFYX₃GX₄X₅X₆G (SEQ ID NO: 2), wherein X₂ is K, A, or N, X₃ is N or A, X₄ is K or A, X₅ is F or V, and X₆ is K or Q, or YINPX₂NDGT (SEQ ID NO: 268), wherein X₂ is K, A, or N; and
c) a CDR-H3 sequence having at least 85%, at least 90%, at least 95%, at least 98%, or 100% sequence identity to the amino acid sequence of FX₇YGX₈AY (SEQ ID NO: 3), wherein X₇ is N or Y, and X₈ s I or F.

18. The isolated antibody of claim 16, comprising a heavy chain comprising:
a) a CDR-H1 sequence having at least 85%, at least 90%, at least 95%, at least 98%, or 100% sequence identity to the amino acid sequence of SEQ ID NO: 7, SEQ ID NO: 29, or SEQ ID NO: 358;
b) a CDR-H2 sequence having at least 85%, at least 90%, at least 95%, at least 98%, or 100% sequence identity to the amino acid sequence of SEQ ID NO: 8, SEQ ID NO: 269, SEQ ID NO: 30, SEQ ID NO: 271, SEQ ID NO: 359, or SEQ ID NO: 272; and
c) a CDR-H3 sequence having at least 85%, at least 90%, at least 95%, at least 98%, or 100% sequence identity to the amino acid sequence of SEQ ID NO: 9 or SEQ ID NO: 31.

19. The isolated antibody of claim 16, comprising a heavy chain comprising:
a) a CDR-H1 comprising the amino acid sequence of SEQ ID NO:7, SEQ ID NO: 29, or SEQ ID NO: 358;
b) a CDR-H2 comprising the amino acid sequence of SEQ ID NO: 8, SEQ ID NO: 269, SEQ ID NO: 30, SEQ ID NO: 271, SEQ ID NO: 359, or SEQ ID NO: 272; and
c) a CDR-H3 comprising the amino acid sequence of SEQ ID NO: 9 or SEQ ID NO: 31.

20. (canceled)

21. The isolated antibody of claim 16, comprising a light chain comprising:
a) a CDR-L1 sequence having at least 85%, at least 90%, at least 95%, at least 98%, or 100% sequence identity to the amino acid sequence of RASQEISGYLX₉ (SEQ ID NO: 4) wherein X₉ is S or A;
b) a CDR-L2 sequence having at least 85%, at least 90%, at least 95%, at least 98%, or 100% sequence identity to the amino acid sequence of AASX₁₀X₁₁DX₁₂ (SEQ ID NO: 5), wherein X₁₀ is T or N, X₁₁ is R or L, and X₁₂ is S or T; and
c) a CDR-L3 sequence having at least 85%, at least 90%, at least 95%, at least 98%, or 100% sequence identity to the amino acid sequence of X₁₃QYASYPWT (SEQ ID NO: 6), wherein X₁₃ is V or L.

22. An isolated antibody that binds to canine IL4R or feline IL4R, wherein the antibody comprises:
a) a CDR-H1 sequence having at least 85%, at least 90%, at least 95%, at least 98%, or 100% sequence identity to the amino acid sequence of GYTFTSYVMX₁ (SEQ ID NO: 1), wherein X₁ is H or N;
b) a CDR-H2 sequence having at least 85%, at least 90%, at least 95%, at least 98%, or 100% sequence identity to the amino acid sequence of YINPX₂NDGTFYX₃GX₄X₅X₆G (SEQ ID NO: 2), wherein X₂ is K, A, or N, X₃ is N or A, X₄ is K or A, X₅ is F or V, and X₆ is K or Q, or YINPX₂NDGT (SEQ ID NO: 268), wherein X₂ is K, A, or N; and
c) a CDR-H3 sequence having at least 85%, at least 90%, at least 95%, at least 98%, or 100% sequence identity to the amino acid sequence of FX₇YGX₉AY (SEQ ID NO: 3), wherein X₇ is N or Y, and X₈ s I or F;
d) a CDR-L1 sequence having at least 85%, at least 90%, at least 95%, at least 98%, or 100% sequence identity to the amino acid sequence of RASQEISGYLX₉ (SEQ ID NO: 4) wherein X₉ is S or A;
e) a CDR-L2 sequence having at least 85%, at least 90%, at least 95%, at least 98%, or 100% sequence identity to the amino acid sequence of AASX₁₀X₁₁DX₁₂ (SEQ ID NO: 5), wherein X₁₀ is T or N, X₁₁ is R or L, and X₁₂ is S or T; and
f) a CDR-L3 sequence having at least 85%, at least 90%, at least 95%, at least 98%, or 100% sequence identity to the amino acid sequence of X₁₃QYASYPWT (SEQ ID NO: 6), wherein X₁₃ is V or L; and
wherein the antibody comprises a variant canine or feline IgG Fc polypeptide capable of binding to neonatal Fc receptor (FcRn) with an increased affinity relative to the wild-type Fc polypeptide.

23. The isolated antibody of claim 16, comprising a light chain comprising:
a) a CDR-L1 sequence having at least 85%, at least 90%, at least 95%, at least 98%, or 100% sequence identity to the amino acid sequence of SEQ ID NO: 14, SEQ ID NO: 36, or SEQ ID NO: 360;
b) a CDR-L2 sequence having at least 85%, at least 90%, at least 95%, at least 98%, or 100% sequence identity to the amino acid sequence of SEQ ID NO: 15, SEQ ID NO: 37, SEQ ID NO: 361, or SEQ ID NO: 362; and
c) a CDR-L3 sequence having at least 85%, at least 90%, at least 95%, at least 98%, or 100% sequence identity to the amino acid sequence of SEQ ID NO: 16 or SEQ ID NO: 38.

24. The isolated antibody of claim 16, comprising a light chain comprising:
a) a CDR-L1 comprising the amino acid sequence of SEQ ID NO: 14, SEQ ID NO: 36, or SEQ ID NO: 360;
b) a CDR-L2 comprising the amino acid sequence of SEQ ID NO: 15, SEQ ID NO: 37, SEQ ID NO: 361, or SEQ ID NO: 362; and
c) a CDR-L3 comprising the amino acid sequence of SEQ ID NO:16 or SEQ ID NO: 38.

25. The antibody of claim 16, further comprising one or more of (a) a variable region heavy chain framework 1 (HC-FR1) sequence of SEQ ID NO: 10 or SEQ ID NO: 32; (b) a HC-FR2 sequence of SEQ ID NO: 11 or SEQ ID NO: 33; (c) a HC-FR3 sequence of SEQ ID NO: 12, SEQ ID NO: 270, SEQ ID NO: 34, SEQ ID NO: 273; (d) a HC-FR4 sequence of SEQ ID NO: 13 or SEQ ID NO: 35; (e) a variable region light chain framework 1 (LC-FR1) sequence of SEQ ID NO: 17 or SEQ ID NO: 39; (f) an LC-FR2 sequence of SEQ ID NO: 18 or SEQ ID NO: 40; (g) an LC-FR3 sequence of SEQ ID NO: 19 or SEQ ID NO: 41; or (h) an LC-FR4 sequence of SEQ ID NO: 20 or SEQ ID NO: 42.

26. The antibody of claim 16, wherein the antibody comprises:
a. (i) a variable heavy chain sequence having at least 85%, at least 90%, at least 95%, at least 98%, or 100% sequence identity to the amino acid sequence of SEQ ID NO: 21 or SEQ ID NO: 43; (ii) a variable light chain sequence having at least 85%, at least 90%, at least 95%, at least 98%, or 100% sequence identity to the amino acid sequence of SEQ ID NO: 22 or SEQ ID NO: 44; or (iii) a variable heavy chain sequence as in (i) and a variable light chain sequence as in (ii); or
b. (i) a variable heavy chain sequence having at least 85%, at least 90%, at least 95%, at least 98%, or 100% sequence identity to the amino acid sequence of SEQ ID NO: 59, SEQ ID NO: 60, SEQ ID NO: 63, SEQ ID NO: 64, SEQ ID NO: 274, or SEQ ID NO: 363; (ii) a variable light chain sequence having at least 85%, at least 90%, at least 95%, at least 98%, or 100% sequence identity to the amino acid sequence of SEQ ID NO: 61, SEQ ID NO: 62, SEQ ID NO: 65, SEQ ID NO: 66, SEQ ID NO: 275, or SEQ ID NO: 364; or (iii) a variable heavy chain sequence as in (i) and a variable light chain sequence as in (ii); or
c. (i) a variable heavy chain sequence having at least 85%, at least 90%, at least 95%, at least 98%, or 100% sequence identity to the amino acid sequence of SEQ ID NO: 67 or SEQ ID NO: 69; (ii) a variable light chain sequence having at least 85%, at least 90%, at least 95%, at least 98%, or 100% sequence identity to the amino acid sequence of SEQ ID NO: 68 or SEQ ID NO: 70; or (iii) a variable heavy chain sequence as in (i) and a variable light chain sequence as in (ii).

27.-29. (canceled)

30. An isolated antibody, wherein the antibody comprises:
a) a variable heavy chain sequence comprising the amino acid sequence of SEQ ID NO: 21 or SEQ ID NO: 43, and a variable light chain sequence comprising the amino acid sequence of SEQ ID NO: 22 or SEQ ID NO: 44;
b) a variable heavy chain sequence comprising the amino acid sequence of SEQ ID NO: 59, SEQ ID NO: 60, SEQ ID NO: 63, SEQ ID NO: 64, SEQ ID NO: 274, or SEQ ID NO: 363, and a variable light chain sequence comprising the amino acid sequence of SEQ ID NO: 61, SEQ ID NO: 62, SEQ ID NO: 65, SEQ ID NO: 66, SEQ ID NO: 275, or SEQ ID NO: 364; or
c) a variable heavy chain sequence comprising the amino acid sequence of SEQ ID NO: 67, SEQ ID NO: 69, SEQ ID NO: 365, or SEQ ID NO: 366, and a variable light chain sequence comprising the amino acid sequence of SEQ ID NO: 68, SEQ ID NO: 70, SEQ ID NO: 367, SEQ ID NO: 368, or SEQ ID NO: 369, and
wherein the antibody comprises a variant canine or feline IgG Fc polypeptide capable of binding to neonatal Fc receptor (FcRn) with an increased affinity relative to the wild-type Fc polypeptide.

31.-129. (canceled)

130. The antibody of claim 16, wherein the antibody is a bispecific antibody that binds to IL4R and one or more antigens selected from IL17, IL31, TNFα, CD20, CD19, CD25, IL4, IL13, IL23, IgE, CD11α, IL6R, α4-Intergrin, IL12, IL1β, or BlyS.

131. (canceled)

132. The antibody of claim 16, wherein the antibody is an antibody fragment, optionally such as an Fv, scFv, Fab, Fab′, F(ab′)₂, or Fab′-SH fragment.

133. An isolated nucleic acid encoding the antibody of claim 16.

134. A host cell comprising the nucleic acid of claim 133.

135. (canceled)

136. A method of producing an antibody comprising culturing the host cell of claim 134 and isolating the antibody.

137. A pharmaceutical composition comprising the antibody of claim 16 and a pharmaceutically acceptable carrier.

138. A method of treating a companion animal species having an IL4/1L13-induced condition, the method comprising administering to the companion animal species a therapeutically effective amount of the antibody of claim 16 or a composition thereof.

139.-145. (canceled)

146. A method of reducing IL4 and/or IL13 signaling function in a cell, the method comprising exposing to the cell the antibody of claim 16 or a composition thereof under conditions permissive for binding of the antibody to extracellular IL4 and/or IL13, thereby reducing binding of IL4 and/or IL13 to IL4R and/or reducing IL4 and/or IL13 signaling function by the cell.

147.-151. (canceled)

152. A method for detecting IL4R in a sample from a companion animal species comprising contacting the sample with the antibody of claim 16 or a composition thereof under conditions permissive for binding of the antibody to IL4R.

153. (canceled)

The application's sequence listing, which the Patent Office published only in electronic form, follows.

SEQUENCE LISTING (421 sequences)

SEQ ID NO: 1 - protein, 10 aa, Artificial Sequence
  Synthetic: CDR-H1
  misc_feature (10)..(10): X is H or N
GYTFTSYVMX

SEQ ID NO: 2 - protein, 17 aa, Artificial Sequence
  Synthetic: CDR-H2
  misc_feature (5)..(5): X is K, A, or N
  misc_feature (12)..(12): X is N or A
  misc_feature (14)..(14): X is K or A
  misc_feature (15)..(15): X is F or V
  misc_feature (16)..(16): X is K or Q
YINPXNDGTFYXGXXXG

SEQ ID NO: 3 - protein, 7 aa, Artificial Sequence
  Synthetic: CDR-H3
  misc_feature (2)..(2): X is N or Y
  misc_feature (5)..(5): X is I or F
FXYGXAY

SEQ ID NO: 4 - protein, 11 aa, Artificial Sequence
  Synthetic: CDR-L1
  misc_feature (11)..(11): X is S or A
RASQEISGYLX

SEQ ID NO: 5 - protein, 7 aa, Artificial Sequence
  Synthetic: CDR-L2
  misc_feature (4)..(4): X is T or N
  misc_feature (5)..(5): X is R or L
  misc_feature (7)..(7): X is S or T
AASXXDX

SEQ ID NO: 6 - protein, 9 aa, Artificial Sequence
  Synthetic: CDR-L3
  misc_feature (1)..(1): X is V or L
XQYASYPWT

SEQ ID NO: 7 - protein, 10 aa, Artificial Sequence
  Synthetic: Clone B CDR-H1
GYTFTSYVMH

SEQ ID NO: 8 - protein, 17 aa, Artificial Sequence
  Synthetic: Clone B CDR-H2
YINPKNDGTFYNGKFKG

SEQ ID NO: 9 - protein, 7 aa, Artificial Sequence
  Synthetic: Clone B CDR-H3
FNYGIAY

SEQ ID NO: 10 - protein, 25 aa, Artificial Sequence
  Synthetic: Clone B HC-FR1
EVKLEESGPELVKPGASVKMSCKAS

SEQ ID NO: 11 - protein, 14 aa, Artificial Sequence
  Synthetic: Clone B HC-FR2
WVKQKPGQGLEWIG

SEQ ID NO: 12 - protein, 32 aa, Artificial Sequence
  Synthetic: Clone B HC-FR3
KATLTSDKSSSTAYMELSSLTSEDSAVYYCAA

SEQ ID NO: 13 - protein, 11 aa, Artificial Sequence
  Synthetic: Clone B HC-FR4
WGQGTLVTVSS

SEQ ID NO: 14 - protein, 11 aa, Artificial Sequence
  Synthetic: Clone B CDR-L1
RASQEISGYLS

SEQ ID NO: 15 - protein, 7 aa, Artificial Sequence
  Synthetic: Clone B CDR-L2
AASTLDS

SEQ ID NO: 16 - protein, 9 aa, Artificial Sequence
  Synthetic: Clone B CDR-L3
VQYASYPWT

SEQ ID NO: 17 - protein, 26 aa, Artificial Sequence
  Synthetic: Clone B LC-FR1
DIVLTQTPSSLSASLGERVSLTCRAS

SEQ ID NO: 18 - protein, 15 aa, Artificial Sequence
  Synthetic: Clone B LC-FR2
WLQQKPDGTIKRLIY

SEQ ID NO: 19 - protein, 32 aa, Artificial Sequence
  Synthetic: Clone B LC-FR3
GVPKRFSGSRSGSDFSLTISSLESEDFADYYC

SEQ ID NO: 20 - protein, 10 aa, Artificial Sequence
  Synthetic: Clone B LC-FR4
FGGGARLEIK

SEQ ID NO: 21 - protein, 116 aa, Artificial Sequence
  Synthetic: Clone B variable HC
EVKLEESGPELVKPGASVKMSCKASGYTFTSYVMHWVKQKPGQGLEWIGYINPKNDGTFYNGKFKGKATLTSDKSSSTAYMELSSLTSEDSAVYYCAAFNYGIAYWGQGTLVTVSS

SEQ ID NO: 22 - protein, 106 aa, Artificial Sequence
  Synthetic: Clone B variable LC
IVLTQTPSSLSASLGERVSLTCRASQEISGYLSWLQQKPDGTIKRLIYAASTLDSGVPKRFSGSRSGSDFSLTISSLESEDFADYYCVQYASYPWTFGGGARLEIK

SEQ ID NO: 23 - protein, 135 aa, Artificial Sequence
  Synthetic: Clone B variable HC with leader sequence
MAVLGLLLCLVTFPSCVLSEVKLEESGPELVKPGASVKMSCKASGYTFTSYVMHWVKQKPGQGLEWIGYINPKNDGTFYNGKFKGKATLTSDKSSSTAYMELSSLTSEDSAVYYCAAFNYGIAYWGQGTLVTVSS

SEQ ID NO: 24 - protein, 126 aa, Artificial Sequence
  Synthetic: Clone B variable LC with leader sequence
METDTLLLWVLLLWVPGSTGIVLTQTPSSLSASLGERVSLTCRASQEISGYLSWLQQKPDGTIKRLIYAASTLDSGVPKRFSGSRSGSDFSLTISSLESEDFADYYCVQYASYPWTFGGGARLEIK

SEQ ID NO: 25 - protein, 440 aa, Artificial Sequence
  Synthetic: Clone B HC
EVKLEESGPELVKPGASVKMSCKASGYTFTSYVMHWVKQKPGQGLEWIGYINPKNDGTFYNGKFKGKATLTSDKSSSTAYMELSSLTSEDSAVYYCAAFNYGIAYWGQGTLVTVSSAKTTPPSVYPLAPGSAAQTNSMVTLGCLVKGYFPEPVTVTWNSGSLSSGVHTFPAVLQSDLYTLSSSVTVPSSPRPSETVTCNVAHPASSTKVDKKIVPRDCGCKPCICTVPEVSSVFIFPPKPKDVLTITLTPKVTCVVVDISKDDPEVQFSWFVDDVEVHTAQTQPREEQFNSTFRSVSELPIMHQDWLNGKEFKCRVNSAAFPAPIEKTISKTKGRPKAPQVYTIPPPKEQMAKDKVSLTCMITDFFPEDITVEWQWNGQPAENYKNTQPIMNTNGSYFVYSKLNVQKSNWEAGNTFTCSVLHEGLHNHHTEKSLSHSPGK

SEQ ID NO: 26 - protein, 213 aa, Artificial Sequence
  Synthetic: Clone B LC
IVLTQTPSSLSASLGERVSLTCRASQEISGYLSWLQQKPDGTIKRLIYAASTLDSGVPKRFSGSRSGSDFSLTISSLESEDFADYYCVQYASYPWTFGGGARLEIKRADAAPTVSIFPPSSEQLTSGGASVVCFLNNFYPKDINVKWKIDGSERQNGVLNSWTDQDSKDSTYSMSSTLTLTKDEYERHNSYTCEATHKTSTSPIVKSFNRNEC

SEQ ID NO: 27 - protein, 459 aa, Artificial Sequence
  Synthetic: Clone B HC with leader sequence
MAVLGLLLCLVTFPSCVLSEVKLEESGPELVKPGASVKMSCKASGYTFTSYVMHWVKQKPGQGLEWIGYINPKNDGTFYNGKFKGKATLTSDKSSSTAYMELSSLTSEDSAVYYCAAFNYGIAYWGQGTLVTVSSAKTTPPSVYPLAPGSAAQTNSMVTLGCLVKGYFPEPVTVTWNSGSLSSGVHTFPAVLQSDLYTLSSSVTVPSSPRPSETVTCNVAHPASSTKVDKKIVPRDCGCKPCICTVPEVSSVFIFPPKPKDVLTITLTPKVTCVVVDISKDDPEVQFSWFVDDVEVHTAQTQPREEQFNSTFRSVSELPIMHQDWLNGKEFKCRVNSAAFPAPIEKTISKTKGRPKAPQVYTIPPPKEQMAKDKVSLTCMITDFFPEDITVEWQWNGQPAENYKNTQPIMNTNGSYFVYSKLNVQKSNWEAGNTFTCSVLHEGLHNHHTEKSLSHSPGK

SEQ ID NO: 28 - protein, 233 aa, Artificial Sequence
  Synthetic: Clone B LC with leader sequence
METDTLLLWVLLLWVPGSTGIVLTQTPSSLSASLGERVSLTCRASQEISGYLSWLQQKPDGTIKRLIYAASTLDSGVPKRFSGSRSGSDFSLTISSLESEDFADYYCVQYASYPWTFGGGARLEIKRADAAPTVSIFPPSSEQLTSGGASVVCFLNNFYPKDINVKWKIDGSERQNGVLNSWTDQDSKDSTYSMSSTLTLTKDEYERHNSYTCEATHKTSTSPIVKSFNRNEC

SEQ ID NO: 29 - protein, 10 aa, Artificial Sequence
  Synthetic: Clone I CDR-H1
GYTFTSYVMH

SEQ ID NO: 30 - protein, 17 aa, Artificial Sequence
  Synthetic: Clone I CDR-H2
YINPNNDGTFYNGKFKG

SEQ ID NO: 31 - protein, 7 aa, Artificial Sequence
  Synthetic: Clone I CDR-H3
FYYGFAY

SEQ ID NO: 32 - protein, 25 aa, Artificial Sequence
  Synthetic: Clone I HC-FR1
EVQLQQSGPELVKPGASVKMSCKAS

SEQ ID NO: 33 - protein, 14 aa, Artificial Sequence
  Synthetic: Clone I HC-FR2
WVKQKPGQGLEWIG

SEQ ID NO: 34 - protein, 32 aa, Artificial Sequence; identical to SEQ ID NO: 12
  Synthetic: Clone I HC-FR3

SEQ ID NO: 35 - protein, 11 aa, Artificial Sequence
  Synthetic: Clone I HC-FR4
WGQGTLVTVSA

SEQ ID NO: 36 - protein, 11 aa, Artificial Sequence
  Synthetic: Clone I CDR-L1
RASQEISGYLS

SEQ ID NO: 37 - protein, 7 aa, Artificial Sequence
  Synthetic: Clone I CDR-L2
AASTLDS

SEQ ID NO: 38 - protein, 9 aa, Artificial Sequence
  Synthetic: Clone I CDR-L3
LQYASYPWT

SEQ ID NO: 39 - protein, 26 aa, Artificial Sequence
  Synthetic: Clone I LC-FR1
DIVLTQSPSSLSASLGERVSLTCRAS

SEQ ID NO: 40 - protein, 15 aa, Artificial Sequence
  Synthetic: Clone I LC-FR2
WLQQKPDGTIKRLIY

SEQ ID NO: 41 - protein, 32 aa, Artificial Sequence; identical to SEQ ID NO: 19
  Synthetic: Clone I LC-FR3

SEQ ID NO: 42 - protein, 10 aa, Artificial Sequence
  Synthetic: Clone I LC-FR4
FGGGAKLEIK

SEQ ID NO: 43 - protein, 116 aa, Artificial Sequence
  Synthetic: Clone I variable HC
EVQLQQSGPELVKPGASVKMSCKASGYTFTSYVMHWVKQKPGQGLEWIGYINPNNDGTFYNGKFKGKATLTSDKSSSTAYMELSSLTSEDSAVYYCAAFYYGFAYWGQGTLVTVSA

SEQ ID NO: 44 - protein, 107 aa, Artificial Sequence
  Synthetic: Clone I variable LC
DIVLTQSPSSLSASLGERVSLTCRASQEISGYLSWLQQKPDGTIKRLIYAASTLDSGVPKRFSGSRSGSDFSLTISSLESEDFADYYCLQYASYPWTFGGGAKLEIK

SEQ ID NO: 45 - protein, 135 aa, Artificial Sequence
  Synthetic: Clone I variable HC with leader sequence
MAVLGLLLCLVTFPSCVLSEVQLQQSGPELVKPGASVKMSCKASGYTFTSYVMHWVKQKPGQGLEWIGYINPNNDGTFYNGKFKGKATLTSDKSSSTAYMELSSLTSEDSAVYYCAAFYYGFAYWGQGTLVTVSA

SEQ ID NO: 46 - protein, 127 aa, Artificial Sequence
  Synthetic: Clone I variable LC with leader sequence
METDTLLLWVLLLWVPGSTGDIVLTQSPSSLSASLGERVSLTCRASQEISGYLSWLQQKPDGTIKRLIYAASTLDSGVPKRFSGSRSGSDFSLTISSLESEDFADYYCLQYASYPWTFGGGAKLEIK

SEQ ID NO: 47 - protein, 440 aa, Artificial Sequence
  Synthetic: Clone I HC
EVQLQQSGPELVKPGASVKMSCKASGYTFTSYVMHWVKQKPGQGLEWIGYINPNNDGTFYNGKFKGKATLTSDKSSSTAYMELSSLTSEDSAVYYCAAFYYGFAYWGQGTLVTVSAAKTTPPSVYPLAPGSAAQTNSMVTLGCLVKGYFPEPVTVTWNSGSLSSGVHTFPAVLQSDLYTLSSSVTVPSSPRPSETVTCNVAHPASSTKVDKKIVPRDCGCKPCICTVPEVSSVFIFPPKPKDVLTITLTPKVTCVVVDISKDDPEVQFSWFVDDVEVHTAQTQPREEQFNSTFRSVSELPIMHQDWLNGKEFKCRVNSAAFPAPIEKTISKTKGRPKAPQVYTIPPPKEQMAKDKVSLTCMITDFFPEDITVEWQWNGQPAENYKNTQPIMNTNGSYFVYSKLNVQKSNWEAGNTFTCSVLHEGLHNHHTEKSLSHSPGK

SEQ ID NO: 48 - protein, 214 aa, Artificial Sequence
  Synthetic: Clone I LC
DIVLTQSPSSLSASLGERVSLTCRASQEISGYLSWLQQKPDGTIKRLIYAASTLDSGVPKRFSGSRSGSDFSLTISSLESEDFADYYCLQYASYPWTFGGGAKLEIKRADAAPTVSIFPPSSEQLTSGGASVVCFLNNFYPKDINVKWKIDGSERQNGVLNSWTDQDSKDSTYSMSSTLTLTKDEYERHNSYTCEATHKTSTSPIVKSFNRNEC

SEQ ID NO: 49 - protein, 459 aa, Artificial Sequence
  Synthetic: Clone I HC with leader sequence
MAVLGLLLCLVTFPSCVLSEVQLQQSGPELVKPGASVKMSCKASGYTFTSYVMHWVKQKPGQGLEWIGYINPNNDGTFYNGKFKGKATLTSDKSSSTAYMELSSLTSEDSAVYYCAAFYYGFAYWGQGTLVTVSAAKTTPPSVYPLAPGSAAQTNSMVTLGCLVKGYFPEPVTVTWNSGSLSSGVHTFPAVLQSDLYTLSSSVTVPSSPRPSETVTCNVAHPASSTKVDKKIVPRDCGCKPCICTVPEVSSVFIFPPKPKDVLTITLTPKVTCVVVDISKDDPEVQFSWFVDDVEVHTAQTQPREEQFNSTFRSVSELPIMHQDWLNGKEFKCRVNSAAFPAPIEKTISKTKGRPKAPQVYTIPPPKEQMAKDKVSLTCMITDFFPEDITVEWQWNGQPAENYKNTQPIMNTNGSYFVYSKLNVQKSNWEAGNTFTCSVLHEGLHNHHTEKSLSHSPGK

SEQ ID NO: 50 - protein, 234 aa, Artificial Sequence
  Synthetic: Clone I LC with leader sequence
METDTLLLWVLLLWVPGSTGDIVLTQSPSSLSASLGERVSLTCRASQEISGYLSWLQQKPDGTIKRLIYAASTLDSGVPKRFSGSRSGSDFSLTISSLESEDFADYYCLQYASYPWTFGGGAKLEIKRADAAPTVSIFPPSSEQLTSGGASVVCFLNNFYPKDINVKWKIDGSERQNGVLNSWTDQDSKDSTYSMSSTLTLTKDEYERHNSYTCEATHKTSTSPIVKSFNRNEC

SEQ ID NO: 51 - protein, 451 aa, Artificial Sequence
  Synthetic: Chimeric Clone B variable HC and canine IgG-B (Chimeric B HC)
EVKLEESGPELVKPGASVKMSCKASGYTFTSYVMHWVKQKPGQGLEWIGYINPKNDGTFYNGKFKGKATLTSDKSSSTAYMELSSLTSEDSAVYYCAAFNYGIAYWGQGTLVTVSSASTTAPSVFPLAPSCGSTSGSTVALACLVSGYFPEPVTVSWNSGSLTSGVHTFPSVLQSSGLYSLSSMVTVPSSRWPSETFTCNVAHPASKTKVDKPVPKRENGRVPRPPDCPKCPAPEMLGGPSVFIFPPKPKDTLLIARTPEVTCVVVDLDPEDPEVQISWFVDGKQMQTAKTQPREEQFNGTYRVVSVLPIGHQDWLKGKQFTCKVNNKALPSPIERTISKARGQAHQPSVYVLPPSREELSKNTVSLTCLIKDFFPPDIDVEWQSNGQQEPESKYRTTPPQLDEDGSYFLYSKLSVDKSRWQRGDTFICAVMHEALHNHYTQESLSHSPGK

SEQ ID NO: 52 - protein, 216 aa, Artificial Sequence
  Synthetic: Chimeric Clone B variable LC and canine kappa light constant region  (Chimeric B LC)
IVLTQTPSSLSASLGERVSLTCRASQEISGYLSWLQQKPDGTIKRLIYAASTLDSGVPKRFSGSRSGSDFSLTISSLESEDFADYYCVQYASYPWTFGGGARLEIKRNDAQPAVYLFQPSPDQLHTGSASVVCLLNSFYPKDINVKWKVDGVIQDTGIQESVTEQDKDSTYSLSSTLTMSSTEYLSHELYSCEITHKSLPSTLIKSFQRSECQRVD

SEQ ID NO: 53 - protein, 470 aa, Artificial Sequence
  Synthetic: Chimeric Clone B variable HC and canine IgG-B with leader sequence
MAVLGLLLCLVTFPSCVLSEVKLEESGPELVKPGASVKMSCKASGYTFTSYVMHWVKQKPGQGLEWIGYINPKNDGTFYNGKFKGKATLTSDKSSSTAYMELSSLTSEDSAVYYCAAFNYGIAYWGQGTLVTVSSASTTAPSVFPLAPSCGSTSGSTVALACLVSGYFPEPVTVSWNSGSLTSGVHTFPSVLQSSGLYSLSSMVTVPSSRWPSETFTCNVAHPASKTKVDKPVPKRENGRVPRPPDCPKCPAPEMLGGPSVFIFPPKPKDTLLIARTPEVTCVVVDLDPEDPEVQISWFVDGKQMQTAKTQPREEQFNGTYRVVSVLPIGHQDWLKGKQFTCKVNNKALPSPIERTISKARGQAHQPSVYVLPPSREELSKNTVSLTCLIKDFFPPDIDVEWQSNGQQEPESKYRTTPPQLDEDGSYFLYSKLSVDKSRWQRGDTFICAVMHEALHNHYTQESLSHSPGK

SEQ ID NO: 54 - protein, 236 aa, Artificial Sequence
  Synthetic: Chimeric Clone B variable LC and canine kappa light constant region with leader sequence
METDTLLLWVLLLWVPGSTGIVLTQTPSSLSASLGERVSLTCRASQEISGYLSWLQQKPDGTIKRLIYAASTLDSGVPKRFSGSRSGSDFSLTISSLESEDFADYYCVQYASYPWTFGGGARLEIKRNDAQPAVYLFQPSPDQLHTGSASVVCLLNSFYPKDINVKWKVDGVIQDTGIQESVTEQDKDSTYSLSSTLTMSSTEYLSHELYSCEITHKSLPSTLIKSFQRSECQRVD

SEQ ID NO: 55 - protein, 451 aa, Artificial Sequence
  Synthetic: Chimeric Clone I variable HC and canine IgG-B (Chimeric I HC)
EVQLQQSGPELVKPGASVKMSCKASGYTFTSYVMHWVKQKPGQGLEWIGYINPNNDGTFYNGKFKGKATLTSDKSSSTAYMELSSLTSEDSAVYYCAAFYYGFAYWGQGTLVTVSAASTTAPSVFPLAPSCGSTSGSTVALACLVSGYFPEPVTVSWNSGSLTSGVHTFPSVLQSSGLYSLSSMVTVPSSRWPSETFTCNVAHPASKTKVDKPVPKRENGRVPRPPDCPKCPAPEMLGGPSVFIFPPKPKDTLLIARTPEVTCVVVDLDPEDPEVQISWFVDGKQMQTAKTQPREEQFNGTYRVVSVLPIGHQDWLKGKQFTCKVNNKALPSPIERTISKARGQAHQPSVYVLPPSREELSKNTVSLTCLIKDFFPPDIDVEWQSNGQQEPESKYRTTPPQLDEDGSYFLYSKLSVDKSRWQRGDTFICAVMHEALHNHYTQESLSHSPGK

SEQ ID NO: 56 - protein, 217 aa, Artificial Sequence
  Synthetic: Chimeric Clone I variable LC and canine kappa light constant region  (Chimeric I LC)
DIVLTQSPSSLSASLGERVSLTCRASQEISGYLSWLQQKPDGTIKRLIYAASTLDSGVPKRFSGSRSGSDFSLTISSLESEDFADYYCLQYASYPWTFGGGAKLEIKRNDAQPAVYLFQPSPDQLHTGSASVVCLLNSFYPKDINVKWKVDGVIQDTGIQESVTEQDKDSTYSLSSTLTMSSTEYLSHELYSCEITHKSLPSTLIKSFQRSECQRVD

SEQ ID NO: 57 - protein, 470 aa, Artificial Sequence
  Synthetic: Chimeric Clone I variable HC and canine IgG-B with leader sequence
MAVLGLLLCLVTFPSCVLSEVQLQQSGPELVKPGASVKMSCKASGYTFTSYVMHWVKQKPGQGLEWIGYINPNNDGTFYNGKFKGKATLTSDKSSSTAYMELSSLTSEDSAVYYCAAFYYGFAYWGQGTLVTVSAASTTAPSVFPLAPSCGSTSGSTVALACLVSGYFPEPVTVSWNSGSLTSGVHTFPSVLQSSGLYSLSSMVTVPSSRWPSETFTCNVAHPASKTKVDKPVPKRENGRVPRPPDCPKCPAPEMLGGPSVFIFPPKPKDTLLIARTPEVTCVVVDLDPEDPEVQISWFVDGKQMQTAKTQPREEQFNGTYRVVSVLPIGHQDWLKGKQFTCKVNNKALPSPIERTISKARGQAHQPSVYVLPPSREELSKNTVSLTCLIKDFFPPDIDVEWQSNGQQEPESKYRTTPPQLDEDGSYFLYSKLSVDKSRWQRGDTFICAVMHEALHNHYTQESLSHSPGK

SEQ ID NO: 58 - protein, 237 aa, Artificial Sequence
  Synthetic: Chimeric Clone I variable LC and canine kappa light constant region with leader sequence
METDTLLLWVLLLWVPGSTGDIVLTQSPSSLSASLGERVSLTCRASQEISGYLSWLQQKPDGTIKRLIYAASTLDSGVPKRFSGSRSGSDFSLTISSLESEDFADYYCLQYASYPWTFGGGAKLEIKRNDAQPAVYLFQPSPDQLHTGSASVVCLLNSFYPKDINVKWKVDGVIQDTGIQESVTEQDKDSTYSLSSTLTMSSTEYLSHELYSCEITHKSLPSTLIKSFQRSECQRVD

SEQ ID NO: 59 - protein, 116 aa, Artificial Sequence
  Synthetic: Caninized Clone B variable HC v1
EVQLVESGGDLVKPGGSLRLSCKASGYTFTSYVMHWVRQAPGQGLEWVAYINPKNDGTFYNGAVKGRFTISRDNARNTLYLQMNSLRSEDTAVYYCAAFNYGIAYWGQGTLVTVSS

SEQ ID NO: 60 - protein, 116 aa, Artificial Sequence
  Synthetic: Caninized Clone B variable HC v2
EVQLVQSGAEVKKPGASVKVSCKASGYTFTSYVMHWVRQAPGQGLEWMGYINPKNDGTFYNGKFQGRVTLTADTSTSTAYMELSSLRAGDIAVYYCAAFNYGIAYWGQGTLVTVSS

SEQ ID NO: 61 - protein, 107 aa, Artificial Sequence
  Synthetic: Caninized Clone B variable LC v1
EIVMTQSPASLSLSQEEKVTITCRASQEISGYLSWLQQKPGGTIKRLIYAASNRDTGVPSRFSGSGSGTDFSFTISSLEPEDVAVYYCVQYASYPWTFGGGAKLEIK

SEQ ID NO: 62 - protein, 107 aa, Artificial Sequence
  Synthetic: Caninized Clone B variable LC v2
DIVMTQTPLSLSVSPGETASISCRASQEISGYLSWLQQKPGGTIKRLIYAASNRDTGVPDRFSGSGSGTDFTLRISRVEADDTGVYYCVQYASYPWTFGGGTKVELK

SEQ ID NO: 63 - protein, 116 aa, Artificial Sequence
  Synthetic: Caninized Clone I variable HC v1
EVQLVESGGDLVKPGGSLRLSCKASGYTFTSYVMHWVRQAPGQGLEWVAYINPNNDGTFYNGAVKGRFTISRDNARNTLYLQMNSLRSEDTAVYYCAAFYYGFAYWGQGTLVTVSS

SEQ ID NO: 64 - protein, 116 aa, Artificial Sequence
  Synthetic: Caninized Clone I variable HC v2
EVQLVQSGAEVKKPGASVKVSCKASGYTFTSYVMHWVRQAPGQGLEWMGYINPNNDGTFYNGKFQGRVTLTADTSTSTAYMELSSLRAGDIAVYYCAAFYYGFAYWGQGTLVTVSS

SEQ ID NO: 65 - protein, 107 aa, Artificial Sequence
  Synthetic: Caninized Clone I variable LC v1
EIVMTQSPASLSLSQEEKVTITCRASQEISGYLSWLQQKPGGTIKRLIYAASNRDTGVPSRFSGSGSGTDFSFTISSLEPEDVAVYYCLQYASYPWTFGGGAKLEIK

SEQ ID NO: 66 - protein, 107 aa, Artificial Sequence
  Synthetic: Caninized Clone I variable LC v2
DIVMTQTPLSLSVSPGETASISCRASQEISGYLSWLQQKPGGTIKRLIYAASNRDTGVPDRFSGSGSGTDFTLRISRVEADDTGVYYCLQYASYPWTFGGGTKVELK

SEQ ID NO: 67 - protein, 116 aa, Artificial Sequence
  Synthetic: Felinized Clone B variable HC
QVLLVQSGAEVRKPGASVKIFCKASGYTFTSYVMHWLRQAPAQGLEWMGYINPKNDGTFYNGKFQGRLTLTADTSTNTAYMELSSLRSADTAVYYCAAFNYGIAYWGQGTLVTVSS

SEQ ID NO: 68 - protein, 107 aa, Artificial Sequence
  Synthetic: Felinized Clone B variable LC
DITMTQSPGSLAGSPGQQVTMNCRASQEISGYLSWLQQKPGGTIKRLIYAASTLDSGVPDRFSGSGSGTDFTLTISNLQAEDVASYYCVQYASYPWTFGGGTKLEIK

SEQ ID NO: 69 - protein, 116 aa, Artificial Sequence
  Synthetic: Felinized Clone I variable HC v1
QVLLVQSGAEVRKPGASVKIFCKASGYTFTSYVMHWLRQAPAQGLEWMGYINPNNDGTFYNGKFQGRLTLTADTSTNTAYMELSSLRSADTAVYYCAAFYYGFAYWGQGTLVTVSS

SEQ ID NO: 70 - protein, 107 aa, Artificial Sequence
  Synthetic: Felinized Clone I variable LC v1
DITMTQSPGSLAGSPGQQVTMNCRASQEISGYLSWLQQKPGGTIKRLIYAASTLDSGVPDRFSGSGSGTDFTLTISNLQAEDVASYYCLQYASYPWTFGGGTKLEIK

SEQ ID NO: 71 - protein, 451 aa, Artificial Sequence
  Synthetic: Caninized Clone B variable HC v1 and  variant canine IgG-B  C1q -, CD16 -
EVQLVESGGDLVKPGGSLRLSCKASGYTFTSYVMHWVRQAPGQGLEWVAYINPKNDGTFYNGAVKGRFTISRDNARNTLYLQMNSLRSEDTAVYYCAAFNYGIAYWGQGTLVTVSSASTTAPSVFPLAPSCGSTSGSTVALACLVSGYFPEPVTVSWNSGSLTSGVHTFPSVLQSSGLYSLSSMVTVPSSRWPSETFTCNVAHPASKTKVDKPVPKRENGRVPRPPDCPKCPAPEPLGGPSVFIFPPKPKDTLLIARTPEVTCVVVDLDREDPEVQISWFVDGKQMQTAKTQPREEQFNGTYRVVSVLPIGHQDWLKGKQFTCRVNNKALPSPIERTISKARGQAHQPSVYVLPPSREELSKNTVSLTCLIKDFFPPDIDVEWQSNGQQEPESKYRTTPPQLDEDGSYFLYSKLSVDKSRWQRGDTFICAVMHEALHNHYTQESLSHSPGK

SEQ ID NO: 72 - protein, 451 aa, Artificial Sequence
  Synthetic: Caninized Clone B variable HC v2 and  variant canine IgG-B  C1q -, CD16 -
EVQLVQSGAEVKKPGASVKVSCKASGYTFTSYVMHWVRQAPGQGLEWMGYINPKNDGTFYNGKFQGRVTLTADTSTSTAYMELSSLRAGDIAVYYCAAFNYGIAYWGQGTLVTVSSASTTAPSVFPLAPSCGSTSGSTVALACLVSGYFPEPVTVSWNSGSLTSGVHTFPSVLQSSGLYSLSSMVTVPSSRWPSETFTCNVAHPASKTKVDKPVPKRENGRVPRPPDCPKCPAPEPLGGPSVFIFPPKPKDTLLIARTPEVTCVVVDLDREDPEVQISWFVDGKQMQTAKTQPREEQFNGTYRVVSVLPIGHQDWLKGKQFTCRVNNKALPSPIERTISKARGQAHQPSVYVLPPSREELSKNTVSLTCLIKDFFPPDIDVEWQSNGQQEPESKYRTTPPQLDEDGSYFLYSKLSVDKSRWQRGDTFICAVMHEALHNHYTQESLSHSPGK

SEQ ID NO: 73 - protein, 217 aa, Artificial Sequence
  Synthetic: Caninized Clone B variable LC v1 and canine kappa light constant region
EIVMTQSPASLSLSQEEKVTITCRASQEISGYLSWLQQKPGGTIKRLIYAASNRDTGVPSRFSGSGSGTDFSFTISSLEPEDVAVYYCVQYASYPWTFGGGAKLEIKRNDAQPAVYLFQPSPDQLHTGSASVVCLLNSFYPKDINVKWKVDGVIQDTGIQESVTEQDKDSTYSLSSTLTMSSTEYLSHELYSCEITHKSLPSTLIKSFQRSECQRVD

SEQ ID NO: 74 - protein, 217 aa, Artificial Sequence
  Synthetic: Caninized Clone B variable LC v2 and canine kappa light constant region
DIVMTQTPLSLSVSPGETASISCRASQEISGYLSWLQQKPGGTIKRLIYAASNRDTGVPDRFSGSGSGTDFTLRISRVEADDTGVYYCVQYASYPWTFGGGTKVELKRNDAQPAVYLFQPSPDQLHTGSASVVCLLNSFYPKDINVKWKVDGVIQDTGIQESVTEQDKDSTYSLSSTLTMSSTEYLSHELYSCEITHKSLPSTLIKSFQRSECQRVD

SEQ ID NO: 75 - protein, 451 aa, Artificial Sequence
  Synthetic: Caninized Clone I variable HC v1 and  variant canine IgG-B  C1q -, CD16 -
EVQLVESGGDLVKPGGSLRLSCKASGYTFTSYVMHWVRQAPGQGLEWVAYINPNNDGTFYNGAVKGRFTISRDNARNTLYLQMNSLRSEDTAVYYCAAFYYGFAYWGQGTLVTVSSASTTAPSVFPLAPSCGSTSGSTVALACLVSGYFPEPVTVSWNSGSLTSGVHTFPSVLQSSGLYSLSSMVTVPSSRWPSETFTCNVAHPASKTKVDKPVPKRENGRVPRPPDCPKCPAPEPLGGPSVFIFPPKPKDTLLIARTPEVTCVVVDLDREDPEVQISWFVDGKQMQTAKTQPREEQFNGTYRVVSVLPIGHQDWLKGKQFTCRVNNKALPSPIERTISKARGQAHQPSVYVLPPSREELSKNTVSLTCLIKDFFPPDIDVEWQSNGQQEPESKYRTTPPQLDEDGSYFLYSKLSVDKSRWQRGDTFICAVMHEALHNHYTQESLSHSPGK

SEQ ID NO: 76 - protein, 451 aa, Artificial Sequence
  Synthetic: Caninized Clone I variable HC v2 and  variant canine IgG-B  C1q -, CD16 -
EVQLVQSGAEVKKPGASVKVSCKASGYTFTSYVMHWVRQAPGQGLEWMGYINPNNDGTFYNGKFQGRVTLTADTSTSTAYMELSSLRAGDIAVYYCAAFYYGFAYWGQGTLVTVSSASTTAPSVFPLAPSCGSTSGSTVALACLVSGYFPEPVTVSWNSGSLTSGVHTFPSVLQSSGLYSLSSMVTVPSSRWPSETFTCNVAHPASKTKVDKPVPKRENGRVPRPPDCPKCPAPEPLGGPSVFIFPPKPKDTLLIARTPEVTCVVVDLDREDPEVQISWFVDGKQMQTAKTQPREEQFNGTYRVVSVLPIGHQDWLKGKQFTCRVNNKALPSPIERTISKARGQAHQPSVYVLPPSREELSKNTVSLTCLIKDFFPPDIDVEWQSNGQQEPESKYRTTPPQLDEDGSYFLYSKLSVDKSRWQRGDTFICAVMHEALHNHYTQESLSHSPGK

SEQ ID NO: 77 - protein, 217 aa, Artificial Sequence
  Synthetic: Caninized Clone I variable LC v1 and canine kappa light constant region
EIVMTQSPASLSLSQEEKVTITCRASQEISGYLSWLQQKPGGTIKRLIYAASNRDTGVPSRFSGSGSGTDFSFTISSLEPEDVAVYYCLQYASYPWTFGGGAKLEIKRNDAQPAVYLFQPSPDQLHTGSASVVCLLNSFYPKDINVKWKVDGVIQDTGIQESVTEQDKDSTYSLSSTLTMSSTEYLSHELYSCEITHKSLPSTLIKSFQRSECQRVD

SEQ ID NO: 78 - protein, 217 aa, Artificial Sequence
  Synthetic: Caninized Clone I variable LC v2 and canine kappa light constant region
DIVMTQTPLSLSVSPGETASISCRASQEISGYLSWLQQKPGGTIKRLIYAASNRDTGVPDRFSGSGSGTDFTLRISRVEADDTGVYYCLQYASYPWTFGGGTKVELKRNDAQPAVYLFQPSPDQLHTGSASVVCLLNSFYPKDINVKWKVDGVIQDTGIQESVTEQDKDSTYSLSSTLTMSSTEYLSHELYSCEITHKSLPSTLIKSFQRSECQRVD

SEQ ID NO: 79 - protein, 451 aa, Artificial Sequence
  Synthetic: Felinized Clone B variable HC and variant feline IgG2 with hinge Cys modification
QVLLVQSGAEVRKPGASVKIFCKASGYTFTSYVMHWLRQAPAQGLEWMGYINPKNDGTFYNGKFQGRLTLTADTSTNTAYMELSSLRSADTAVYYCAAFNYGIAYWGQGTLVTVSSASTTASSVFPLAPSCGTTSGATVALACLVLGYFPEPVTVSWNSGALTSGVHTFPSVLQASGLYSLSSMVTVPSSRWLSDTFTCNVAHRPSSTKVDKTVPKTASTIESKTGECPKCPVPEIPGAPSVFIFPPKPKDTLSISRTPEVTCLVVDLGPDDSNVQITWFVDNTEMHTAKTRPREEQFNSTYRVVSVLPILHQDWLKGKEFKCKVNSKSLPSAMERTISKAKGQPHEPQVYVLPPTQEELSENKVSVTCLIKGFHPPDIAVEWEITGQPEPENNYQTTPPQLDSDGTYFLYSRLSVDRSHWQRGNTYTCSVSHEALHSHHTQKSLTQSPGK

SEQ ID NO: 80 - protein, 451 aa, Artificial Sequence
  Synthetic: Felinized Clone B variable HC and variant feline IgG2 with feline IgG1hinge
QVLLVQSGAEVRKPGASVKIFCKASGYTFTSYVMHWLRQAPAQGLEWMGYINPKNDGTFYNGKFQGRLTLTADTSTNTAYMELSSLRSADTAVYYCAAFNYGIAYWGQGTLVTVSSASTTASSVFPLAPSCGTTSGATVALACLVLGYFPEPVTVSWNSGALTSGVHTFPSVLQASGLYSLSSMVTVPSSRWLSDTFTCNVAHRPSSTKVDKTVRKTDHPPGPKPCDCPKCPPPEMLGGPSVFIFPPKPKDTLSISRTPEVTCLVVDLGPDDSNVQITWFVDNTEMHTAKTRPREEQFNSTYRVVSVLPILHQDWLKGKEFKCKVNSKSLPSAMERTISKAKGQPHEPQVYVLPPTQEELSENKVSVTCLIKGFHPPDIAVEWEITGQPEPENNYQTTPPQLDSDGTYFLYSRLSVDRSHWQRGNTYTCSVSHEALHSHHTQKSLTQSPGK

SEQ ID NO: 81 - protein, 217 aa, Artificial Sequence
  Synthetic: Felinized Clone B variable LC and feline  kappa light constant region
DITMTQSPGSLAGSPGQQVTMNCRASQEISGYLSWLQQKPGGTIKRLIYAASTLDSGVPDRFSGSGSGTDFTLTISNLQAEDVASYYCVQYASYPWTFGGGTKLEIKRSDAQPSVFLFQPSLDELHTGSASIVCILNDFYPKEVNVKWKVDGVVQNKGIQESTTEQNSKDSTYSLSSTLTMSSTEYQSHEKFSCEVTHKSLASTLVKSFNRSECQRE

SEQ ID NO: 82 - protein, 451 aa, Artificial Sequence
  Synthetic: Felinized Clone I variable HC v1 and variant feline IgG2 with hinge Cys modification
QVLLVQSGAEVRKPGASVKIFCKASGYTFTSYVMHWLRQAPAQGLEWMGYINPNNDGTFYNGKFQGRLTLTADTSTNTAYMELSSLRSADTAVYYCAAFYYGFAYWGQGTLVTVSSASTTASSVFPLAPSCGTTSGATVALACLVLGYFPEPVTVSWNSGALTSGVHTFPSVLQASGLYSLSSMVTVPSSRWLSDTFTCNVAHRPSSTKVDKTVPKTASTIESKTGECPKCPVPEIPGAPSVFIFPPKPKDTLSISRTPEVTCLVVDLGPDDSNVQITWFVDNTEMHTAKTRPREEQFNSTYRVVSVLPILHQDWLKGKEFKCKVNSKSLPSAMERTISKAKGQPHEPQVYVLPPTQEELSENKVSVTCLIKGFHPPDIAVEWEITGQPEPENNYQTTPPQLDSDGTYFLYSRLSVDRSHWQRGNTYTCSVSHEALHSHHTQKSLTQSPGK

SEQ ID NO: 83 - protein, 451 aa, Artificial Sequence
  Synthetic: Felinized Clone I variable HC v1 and variant feline IgG2 with feline IgG1 hinge
QVLLVQSGAEVRKPGASVKIFCKASGYTFTSYVMHWLRQAPAQGLEWMGYINPNNDGTFYNGKFQGRLTLTADTSTNTAYMELSSLRSADTAVYYCAAFYYGFAYWGQGTLVTVSSASTTASSVFPLAPSCGTTSGATVALACLVLGYFPEPVTVSWNSGALTSGVHTFPSVLQASGLYSLSSMVTVPSSRWLSDTFTCNVAHRPSSTKVDKTVRKTDHPPGPKPCDCPKCPPPEMLGGPSVFIFPPKPKDTLSISRTPEVTCLVVDLGPDDSNVQITWFVDNTEMHTAKTRPREEQFNSTYRVVSVLPILHQDWLKGKEFKCKVNSKSLPSAMERTISKAKGQPHEPQVYVLPPTQEELSENKVSVTCLIKGFHPPDIAVEWEITGQPEPENNYQTTPPQLDSDGTYFLYSRLSVDRSHWQRGNTYTCSVSHEALHSHHTQKSLTQSPGK

SEQ ID NO: 84 - protein, 217 aa, Artificial Sequence
  Synthetic: Felinized Clone I variable LC v1 and feline kappa light constant region
DITMTQSPGSLAGSPGQQVTMNCRASQEISGYLSWLQQKPGGTIKRLIYAASTLDSGVPDRFSGSGSGTDFTLTISNLQAEDVASYYCLQYASYPWTFGGGTKLEIKRSDAQPSVFLFQPSLDELHTGSASIVCILNDFYPKEVNVKWKVDGVVQNKGIQESTTEQNSKDSTYSLSSTLTMSSTEYQSHEKFSCEVTHKSLASTLVKSFNRSECQRE

SEQ ID NO: 85 - protein, 10 aa, Artificial Sequence
  Synthetic: IL4R epitope 1 (minimal sequence)
  misc_feature (2)..(2): X is D or N
  misc_feature (9)..(9): X is H or R
LXFMGSENXT

SEQ ID NO: 86 - protein, 20 aa, Artificial Sequence
  Synthetic: IL4R epitope 1 (expanded sequence)
  misc_feature (7)..(7): X is D or N
  misc_feature (14)..(14): X is H or R
RLSYQLXFMGSENXTCVPEN

SEQ ID NO: 87 - protein, 22 aa, Artificial Sequence
  Synthetic: IL4R epitope 2
  misc_feature (3)..(3): X is P or L
  misc_feature (4)..(4): X is I or M
  misc_feature (7)..(7): X is A or F
  misc_feature (16)..(16): X is D or H
  misc_feature (21)..(21): X is Q or T
SMXXDDXVEADVYQLXLWAGXQ

SEQ ID NO: 88 - protein, 10 aa, Canis lupus familiaris
  misc_feature (1)..(10): Canine IL4R epitope 1 (minimal sequence)
LDFMGSENHT

SEQ ID NO: 89 - protein, 20 aa, Canis lupus familiaris
  misc_feature (1)..(20): Canine IL4R epitope 1 (expanded sequence)
RLSYQLDFMGSENHTCVPEN

SEQ ID NO: 90 - protein, 22 aa, Canis lupus familiaris
  misc_feature (1)..(22): Canine IL4R epitope 2
SMPIDDAVEADVYQLDLWAGQQ

SEQ ID NO: 91 - protein, 10 aa, Felis catus
  misc_feature (1)..(10): Feline IL4R epitope 1 (minimal sequence)
LNFMGSENRT

SEQ ID NO: 92 - protein, 20 aa, Felis catus
  misc_feature (1)..(20): Feline IL4R epitope 1 (expanded sequence)
RLSYQLNFMGSENRTCVPEN

SEQ ID NO: 93 - protein, 22 aa, Felis catus
  misc_feature (1)..(22): Feline IL4R epitope 2
SMLMDDFVEADVYQLHLWAGTQ

SEQ ID NO: 94 - protein, 823 aa, Canis lupus familiaris
  misc_feature (1)..(823): Canine IL4R  NCBI Reference Sequence: XP_0139700003.1 Interleukin-4 receptor subunit alpha isoform X1 [Canis lupus familiaris]
MGRLCSGLTFPVSCLVLVWVASSGSVKVLHEPSCFSDYISTSVCQWKMDHPTNCSAELRLSYQLDFMGSENHTCVPENREDSVCVCSMPIDDAVEADVYQLDLWAGQQLLWSGSFQPSKHVKPRTPGNLTVHPNISHTWLLMWTNPYPTENHLHSELTYMVNVSNDNDPEDFKVYNVTYMGPTLRLAASTLKSGASYSARVRAWAQTYNSTWSDWSPSTTWLNYYEPWEQHLPLGVSISCLVILAICLSCYFSIIKIKKGWWDQIPNPAHSPLVAIVIQDSQVSLWGKRSRGQEPAKCPHWKTCLTKLLPCLLEHGLGREEESPKTAKNGPLQGPGKPAWCPVEVSKTILWPESISVVQCVELSEAPVDNEEEEEVEEDKRSLCPSLEGSGGSFQEGREGIVARLTESLFLDLLGGENGGFCPQGLEESCLPPPSGSVGAQMPWAQFPRAGPRAAPEGPEQPRRPESALQASPTQSAGSSAFPEPPPVVTDNPAYRSFGSFLGQSSDPGDGDSDPELADRPGEADPGIPSAPQPPEPPAALQPEPESWEQILRQSVLQHRAAPAPGPGPGSGYREFTCAVKQGSAPDAGGPGFGPSGEAGYKAFCSLLPGGATCPGTSGGEAGSGEGGYKPFQSLTPGCPGAPTPVPVPLFTFGLDTEPPGSPQDSLGAGSSPEHLGVEPAGKEEDSRKTLLAPEQATDPLRDDLASSIVYSALTCHLCGHLKQWHDQEERGKAHIVPSPCCGCCCGDRSSLLLSPLRAPNVLPGGVLLEASLSPASLVPSGVSKEGKSSPFSQPASSSAQSSSQTPKKLAVLSTEPTCMSAS

SEQ ID NO: 95 - protein, 818 aa, Felis catus
  misc_feature (1)..(818): Feline IL4R  NCBI Reference Sequence:  XP_023102076.1 Interleukin-4 receptor subunit alpha [Felis catus]
MGRLCSGLTFPVSCLILMWAAGSGSVKVLRAPTCFSDYFSTSVCQWNMDAPTNCSAELRLSYQLNFMGSENRTCVPENGEGAACACSMLMDDFVEADVYQLHLWAGTQLLWSGSFKPSSHVKPRAPGNLTVHPNVSHTWLLRWSNPYPPENHLHAELTYMVNISSEDDPTDSRIYNVTYMGPTLRVAASTLTSGASYSARVRAWAQSYNSTWSEWSPSTKWLNHYEPWEQHLPLGVSISCLVILAVCLSCYLSVIKIKKEWWDQIPNPAHSHLVAIVIQDPQVSLWGKRSRGQEPAKCSHWKTCLRKLLPCLLEHGMERKEDPSKIARNGPSQGSGKSAWCPVEVSKTILWPESISVVRCVELLEAPVESEEEEEEEEEDKGSFCPSPVNLEDSFQEGREGIAARLTESLFMDLLGVEKGGFGPQGSLESWFPPPSGSAGAQMPWAEFPGPGPQEASPQGKEQPFDPRSDPLATLPQSPASPTFPETPPVVTDNPAYRSFGTFQGRSSGPGECDSGPELAGRLGEADPGIPAAPQPSEPPSALQPEAETWEQILRQRVLQHRGAPAPAPGSGYREFVCAVRQGSTQDSRVGDFGPSEEAGYKAFSSLLTSGAVCPETSGGEAGSGDGGYKPFQSLTPGCPGAPAPVPVPLFTFGLDAEPPHCPQDSPLPGSSPEPAGKAQDSHKTPPAPEQAADPLRDDLASGIVYSALTCHLCGHLKQCHGQEEGGEAHPVASPCCGCCCGDRSSPLVSPLRAPDPLPGGVPLEASLSPASPAPLAVSEEGPPSLCFQPALSHAHSSSQTPKKVAMLSPEPTCTMAS

SEQ ID NO: 96 - protein, 809 aa, Equus caballus
  misc_feature (1)..(809): Equine IL4R  NCBI Reference Sequence: NP_001075243.1 Interleukin-4 receptor subunit alpha precursor [Equus caballus]
MGCLCPGLTLPVSCLILVWAAGSGSVKVLRLTACFSDYISASTCEWKMDRPTNCSAQLRLSYQLNDEFSDNLTCIPENREDEVCVCRMLMDNIVSEDVYELDLWAGNQLLWNSSFKPSRHVKPRAPQNLTVHAISHTWLLTWSNPYPLKNHLWSELTYLVNISKEDDPTDFKIYNVTYMDPTLRVTASTLKSRATYSARVKARAQNYNSTWSEWSPSTTWHNYYEQPLEQRLPLGVSISCVVILAICLSCYFSIIKIKKEWWDQIPNPAHSPLVAIVLQDSQVSLWGKQSRGQEPAKCPRWKTCLTKLLPCLLEHGLQKEEDSSKTVRNGPFQSPGKSAWHTVEVNHTILRPEIISVVPCVELCEAQVESEEEEVEEDRGSFCPSPESSGSGFQEGREGVAARLTESLFLGLLGAENGALGESCLLPPLGSAHMPWARISSAGPQEAASQGEEQPLNPESNPLATLTQSPGSLAFTEAPAVVADNPAYRSFSNSLSQPRGPGELDSDPQLAEHLGQVDPSIPSAPQPSEPPTALQPEPETWEQMLRQSVLQQGAAPAPASAPTGGYREFAQVVKQGGGAAGSGPSGEAGYKAFSSLLAGSAVCPGQSGVEASSGEGGYRPYESPDPGAPAPVPVPLFTFGLDVEPPHSPQNSLLPGGSPELPGPEPTVKGEDPRKPLLSAQQATDSLRDDLGSGIVYSALTCHLCGHLKQCHGQEEHGEAHTVASPCCGCCCGDRSSPPVSPVRALDPPPGGVPLEAGLSLASLGSLGLSEERKPSLFFQPAPGNAQSSSQTPLTVAMLSTGPTCTSAS

SEQ ID NO: 97 - protein, 810 aa, Mus musculus
  misc_feature (1)..(810): Murine IL4R  NCBI Reference Sequence: NP_001008700.1 Interleukin-4 receptor subunit alpha isoform 1 precursor [Mus musculus]
MGRLCTKFLTSVGCLILLLVTGSGSIKVLGEPTCFSDYIRTSTCEWFLDSAVDCSSQLCLHYRLMFFEFSENLTCIPRNSASTVCVCHMEMNRPVQSDRYQMELWAEHRQLWQGSFSPSGNVKPLAPDNLTLHTNVSDEWLLTWNNLYPSNNLLYKDLISMVNISREDNPAEFIVYNVTYKEPRLSFPINILMSGVYYTARVRVRSQILTGTWSEWSPSITWYNHFQLPLIQRLPLGVTISCLCIPLFCLFCYFSITKIKKIWWDQIPTPARSPLVAIIIQDAQVPLWDKQTRSQESTKYPHWKTCLDKLLPCLLKHRVKKKTDFPKAAPTKSLQSPGKAGWCPMEVSRTVLWPENVSVSVVRCMELFEAPVQNVEEEEDEIVKEDLSMSPENSGGCGFQESQADIMARLTENLFSDLLEAENGGLGQSALAESCSPLPSGSGQASVSWACLPMGPSEEATCQVTEQPSHPGPLSGSPAQSAPTLACTQVPLVLADNPAYRSFSDCCSPAPNPGELAPEQQQADHLEEEEPPSPADPHSSGPPMQPVESWEQILHMSVLQHGAAAGSTPAPAGGYQEFVQAVKQGAAQDPGVPGVRPSGDPGYKAFSSLLSSNGIRGDTAAAGTDDGHGGYKPFQNPVPNQSPSSVPLFTFGLDTELSPSPLNSDPPKSPPECLGLELGLKGGDWVKAPPPADQVPKPFGDDLGFGIVYSSLTCHLCGHLKQHHSQEEGGQSPIVASPGCGCCYDDRSPSLGSLSGALESCPEGIPPEANLMSAPKTPSNLSGEGKGPGHSPVPSQTTEVPVGALGIAVS

SEQ ID NO: 98 - protein, 825 aa, Homo sapiens
  misc_feature (1)..(825): Human IL4R  NCBI Reference Sequence: NP_000409.1 Interleukin-4 receptor subunit alpha isoform a precursor [Homo sapiens]
MGWLCSGLLFPVSCLVLLQVASSGNMKVLQEPTCVSDYMSISTCEWKMNGPTNCSTELRLLYQLVFLLSEAHTCIPENNGGAGCVCHLLMDDVVSADNYTLDLWAGQQLLWKGSFKPSEHVKPRAPGNLTVHTNVSDTLLLTWSNPYPPDNYLYNHLTYAVNIWSENDPADFRIYNVTYLEPSLRIAASTLKSGISYRARVRAWAQCYNTTWSEWSPSTKWHNSYREPFEQHLLLGVSVSCIVILAVCLLCYVSITKIKKEWWDQIPNPARSRLVAIIIQDAQGSQWEKRSRGQEPAKCPHWKNCLTKLLPCFLEHNMKRDEDPHKAAKEMPFQGSGKSAWCPVEISKTVLWPESISVVRCVELFEAPVECEEEEEVEEEKGSFCASPESSRDDFQEGREGIVARLTESLFLDLLGEENGGFCQQDMGESCLLPPSGSTSAHMPWDEFPSAGPKEAPPWGKEQPLHLEPSPPASPTQSPDNLTCTETPLVIAGNPAYRSFSNSLSQSPCPRELGPDPLLARHLEEVEPEMPCVPQLSEPTTVPQPEPETWEQILRRNVLQHGAAAAPVSAPTSGYQEFVHAVEQGGTQASAVVGLGPPGEAGYKAFSSLLASSAVSPEKCGFGASSGEEGYKPFQDLIPGCPGDPAPVPVPLFTFGLDREPPRSPQSSHLPSSSPEHLGLEPGEKVEDMPKPPLPQEQATDPLVDSLGSGIVYSALTCHLCGHLKQCHGQEDGGQTPVMASPCCGCCCGDRSSPPTTPLRAPDPSPGGVPLEASLCPASLAPSGISEKSKSSSSFHPAPGNAQSSSQTPKIVNFVSVGPTYMRVS

SEQ ID NO: 99 - protein, 203 aa, Canis lupus familiaris
  misc_feature (1)..(203): Canine IL4R_ECD
GSVKVLHEPSCFSDYISTSVCQWKMDHPTNCSAELRLSYQLDFMGSENHTCVPENREDSVCVCSMPIDDAVEADVYQLDLWAGQQLLWSGSFQPSKHVKPRTPGNLTVHPNISHTWLLMWTNPYPTENHLHSELTYMVNVSNDNDPEDFKVYNVTYMGPTLRLAASTLKSGASYSARVRAWAQTYNSTWSDWSPSTTWLNYYE

SEQ ID NO: 100 - protein, 203 aa, Felis catus
  misc_feature (1)..(203): Feline IL4R_ECD
GSVKVLRAPTCFSDYFSTSVCQWNMDAPTNCSAELRLSYQLNFMGSENRTCVPENGEGAACACSMLMDDFVEADVYQLHLWAGTQLLWSGSFKPSSHVKPRAPGNLTVHPNVSHTWLLRWSNPYPPENHLHAELTYMVNISSEDDPTDSRIYNVTYMGPTLRVAASTLTSGASYSARVRAWAQSYNSTWSEWSPSTKWLNHYE

SEQ ID NO: 101 - protein, 206 aa, Equus caballus
  misc_feature (1)..(206): Equine IL4R_ECD
VKVLRLTACFSDYISASTCEWKMDRPTNCSAQLRLSYQLNDEFSDNLTCIPENREDEVCVCRMLMDNIVSEDVYELDLWAGNQLLWNSSFKPSRHVKPRAPQNLTVHAISHTWLLTWSNPYPLKNHLWSELTYLVNISKEDDPTDFKIYNVTYMDPTLRVTASTLKSRATYSARVKARAQNYNSTWSEWSPSTTWHNYYEQPLEQR

SEQ ID NO: 102 - protein, 238 aa, Mus musculus
  misc_feature (1)..(238): Murine IL4R_ECD
IKVLGEPTCFSDYIRTSTCEWFLDSAVDCSSQLCLHYRLMFFEFSENLTCIPRNSASTVCVCHMEMNRPVQSDRYQMELWAEHRQLWQGSFSPSGNVKPLAPDNLTLHTNVSDEWLLTWNNLYPSNNLLYKDLISMVNISREDNPAEFIVYNVTYKEPRLSFPINILMSGVYYTARVRVRSQILTGTWSEWSPSITWYNHFQLPLIQRLPLGVTISCLCIPLFCLFCYFSITKIKKIW

SEQ ID NO: 103 - protein, 209 aa, Homo sapiens
  misc_feature (1)..(209): Human IL4R_ECD
GNMKVLQEPTCVSDYMSISTCEWKMNGPTNCSTELRLLYQLVFLLSEAHTCIPENNGGAGCVCHLLMDDVVSADNYTLDLWAGQQLLWKGSFKPSEHVKPRAPGNLTVHTNVSDTLLLTWSNPYPPDNYLYNHLTYAVNIWSENDPADFRIYNVTYLEPSLRIAASTLKSGISYRARVRAWAQCYNTTWSEWSPSTKWHNSYREPFEQH

SEQ ID NO: 104 - protein, 835 aa, Canis lupus familiaris
  misc_feature (1)..(835): Canine IL4R_C-FLAG with leader
MGRLCSGLTFPVSCLVLVWVASSGSVKVLHEPSCFSDYISTSVCQWKMDHPTNCSAELRLSYQLDFMGSENHTCVPENREDSVCVCSMPIDDAVEADVYQLDLWAGQQLLWSGSFQPSKHVKPRTPGNLTVHPNISHTWLLMWTNPYPTENHLHSELTYMVNVSNDNDPEDFKVYNVTYMGPTLRLAASTLKSGASYSARVRAWAQTYNSTWSDWSPSTTWLNYYEPWEQHLPLGVSISCLVILAICLSCYFSIIKIKKGWWDQIPNPAHSPLVAIVIQDSQVSLWGKRSRGQEPAKCPHWKTCLTKLLPCLLEHGLGREEESPKTAKNGPLQGPGKPAWCPVEVSKTILWPESISVVQCVELSEAPVDNEEEEEVEEDKRSLCPSLEGSGGSFQEGREGIVARLTESLFLDLLGGENGGFCPQGLEESCLPPPSGSVGAQMPWAQFPRAGPRAAPEGPEQPRRPESALQASPTQSAGSSAFPEPPPVVTDNPAYRSFGSFLGQSSDPGDGDSDPELADRPGEADPGIPSAPQPPEPPAALQPEPESWEQILRQSVLQHRAAPAPGPGPGSGYREFTCAVKQGSAPDAGGPGFGPSGEAGYKAFCSLLPGGATCPGTSGGEAGSGEGGYKPFQSLTPGCPGAPTPVPVPLFTFGLDTEPPGSPQDSLGAGSSPEHLGVEPAGKEEDSRKTLLAPEQATDPLRDDLASSIVYSALTCHLCGHLKQWHDQEERGKAHIVPSPCCGCCCGDRSSLLLSPLRAPNVLPGGVLLEASLSPASLVPSGVSKEGKSSPFSQPASSSAQSSSQTPKKLAVLSTEPTCMSASGSGSDYKDDDDK

SEQ ID NO: 105 - protein, 812 aa, Canis lupus familiaris
  misc_feature (1)..(812): Canine IL4R_C-FLAG
GSVKVLHEPSCFSDYISTSVCQWKMDHPTNCSAELRLSYQLDFMGSENHTCVPENREDSVCVCSMPIDDAVEADVYQLDLWAGQQLLWSGSFQPSKHVKPRTPGNLTVHPNISHTWLLMWTNPYPTENHLHSELTYMVNVSNDNDPEDFKVYNVTYMGPTLRLAASTLKSGASYSARVRAWAQTYNSTWSDWSPSTTWLNYYEPWEQHLPLGVSISCLVILAICLSCYFSIIKIKKGWWDQIPNPAHSPLVAIVIQDSQVSLWGKRSRGQEPAKCPHWKTCLTKLLPCLLEHGLGREEESPKTAKNGPLQGPGKPAWCPVEVSKTILWPESISVVQCVELSEAPVDNEEEEEVEEDKRSLCPSLEGSGGSFQEGREGIVARLTESLFLDLLGGENGGFCPQGLEESCLPPPSGSVGAQMPWAQFPRAGPRAAPEGPEQPRRPESALQASPTQSAGSSAFPEPPPVVTDNPAYRSFGSFLGQSSDPGDGDSDPELADRPGEADPGIPSAPQPPEPPAALQPEPESWEQILRQSVLQHRAAPAPGPGPGSGYREFTCAVKQGSAPDAGGPGFGPSGEAGYKAFCSLLPGGATCPGTSGGEAGSGEGGYKPFQSLTPGCPGAPTPVPVPLFTFGLDTEPPGSPQDSLGAGSSPEHLGVEPAGKEEDSRKTLLAPEQATDPLRDDLASSIVYSALTCHLCGHLKQWHDQEERGKAHIVPSPCCGCCCGDRSSLLLSPLRAPNVLPGGVLLEASLSPASLVPSGVSKEGKSSPFSQPASSSAQSSSQTPKKLAVLSTEPTCMSASGSGSDYKDDDDK

SEQ ID NO: 106 - protein, 237 aa, Canis lupus familiaris
  misc_feature (1)..(237): Canine IL4R-ECD_C-His6 with leader
MDMRVPAQLLGLLLLWLRGARCSGSVKVLHEPSCFSDYISTSVCQWKMDHPTNCSAELRLSYQLDFMGSENHTCVPENREDSVCVCSMPIDDAVEADVYQLDLWAGQQLLWSGSFQPSKHVKPRTPGNLTVHPNISHTWLLMWTNPYPTENHLHSELTYMVNVSNDNDPEDFKVYNVTYMGPTLRLAASTLKSGASYSARVRAWAQTYNSTWSDWSPSTTWLNYYEPGSGSHHHHHH

SEQ ID NO: 107 - protein, 214 aa, Canis lupus familiaris
  misc_feature (1)..(214): Canine IL4R-ECD_C-His6
GSVKVLHEPSCFSDYISTSVCQWKMDHPTNCSAELRLSYQLDFMGSENHTCVPENREDSVCVCSMPIDDAVEADVYQLDLWAGQQLLWSGSFQPSKHVKPRTPGNLTVHPNISHTWLLMWTNPYPTENHLHSELTYMVNVSNDNDPEDFKVYNVTYMGPTLRLAASTLKSGASYSARVRAWAQTYNSTWSDWSPSTTWLNYYEPGSGSHHHHHH

SEQ ID NO: 108 - protein, 473 aa, Canis lupus familiaris
  misc_feature (1)..(473): Canine IL4R-ECD_ C HuFc_His6 with leader
MDMRVPAQLLGLLLLWLRGARCSGSVKVLHEPSCFSDYISTSVCQWKMDHPTNCSAELRLSYQLDFMGSENHTCVPENREDSVCVCSMPIDDAVEADVYQLDLWAGQQLLWSGSFQPSKHVKPRTPGNLTVHPNISHTWLLMWTNPYPTENHLHSELTYMVNVSNDNDPEDFKVYNVTYMGPTLRLAASTLKSGASYSARVRAWAQTYNSTWSDWSPSTTWLNYYEPGSENLYFQGPKSCDKTHTCPPCPAPELLGGPSVFLFPPKPKDTLMISRTPEVTCVVVDVSHEDPEVKFNWYVDGVEVHNAKTKPREEQYNSTYRVVSVLTVLHQDWLNGKEYKCKVSNKALPAPIEKTISKAKGQPREPQVYTLPPSRDELTKNQVSLTCLVKGFYPSDIAVEWESNGQPENNYKTTPPVLDSDGSFFLYSKLTVDKSRWQQGNVFSCSVMHEALHNHYTQKSLSLSPGKHHHHHH

SEQ ID NO: 109 - protein, 450 aa, Canis lupus familiaris
  misc_feature (1)..(450): Canine IL4R-ECD_ C HuFc_His6
GSVKVLHEPSCFSDYISTSVCQWKMDHPTNCSAELRLSYQLDFMGSENHTCVPENREDSVCVCSMPIDDAVEADVYQLDLWAGQQLLWSGSFQPSKHVKPRTPGNLTVHPNISHTWLLMWTNPYPTENHLHSELTYMVNVSNDNDPEDFKVYNVTYMGPTLRLAASTLKSGASYSARVRAWAQTYNSTWSDWSPSTTWLNYYEPGSENLYFQGPKSCDKTHTCPPCPAPELLGGPSVFLFPPKPKDTLMISRTPEVTCVVVDVSHEDPEVKFNWYVDGVEVHNAKTKPREEQYNSTYRVVSVLTVLHQDWLNGKEYKCKVSNKALPAPIEKTISKAKGQPREPQVYTLPPSRDELTKNQVSLTCLVKGFYPSDIAVEWESNGQPENNYKTTPPVLDSDGSFFLYSKLTVDKSRWQQGNVFSCSVMHEALHNHYTQKSLSLSPGKHHHHHH

SEQ ID NO: 110 - protein, 471 aa, Felis catus
  misc_feature (1)..(471): Feline IL4R-ECD_ C HuFc_His6 with leader
MDMRVPAQLLGLLLLWLRGARCGSVKVLRAPTCFSDYFSTSVCQWNMDAPTNCSAELRLSYQLNFMGSENRTCVPENGEGAACACSMLMDDFVEADVYQLHLWAGTQLLWSGSFKPSSHVKPRAPGNLTVHPNVSHTWLLRWSNPYPPENHLHAELTYMVNISSEDDPTDSRIYNVTYMGPTLRVAASTLTSGASYSARVRAWAQSYNSTWSDWSPSTTWLNYYEGSENLYFQGPKSCDKTHTCPPCPAPELLGGPSVFLFPPKPKDTLMISRTPEVTCVVVDVSHEDPEVKFNWYVDGVEVHNAKTKPREEQYNSTYRVVSVLTVLHQDWLNGKEYKCKVSNKALPAPIEKTISKAKGQPREPQVYTLPPSRDELTKNQVSLTCLVKGFYPSDIAVEWESNGQPENNYKTTPPVLDSDGSFFLYSKLTVDKSRWQQGNVFSCSVMHEALHNHYTQKSLSLSPGKHHHHHH

SEQ ID NO: 111 - protein, 449 aa, Felis catus
  misc_feature (1)..(449): Feline IL4R-ECD_ C HuFc_His6
GSVKVLRAPTCFSDYFSTSVCQWNMDAPTNCSAELRLSYQLNFMGSENRTCVPENGEGAACACSMLMDDFVEADVYQLHLWAGTQLLWSGSFKPSSHVKPRAPGNLTVHPNVSHTWLLRWSNPYPPENHLHAELTYMVNISSEDDPTDSRIYNVTYMGPTLRVAASTLTSGASYSARVRAWAQSYNSTWSDWSPSTTWLNYYEGSENLYFQGPKSCDKTHTCPPCPAPELLGGPSVFLFPPKPKDTLMISRTPEVTCVVVDVSHEDPEVKFNWYVDGVEVHNAKTKPREEQYNSTYRVVSVLTVLHQDWLNGKEYKCKVSNKALPAPIEKTISKAKGQPREPQVYTLPPSRDELTKNQVSLTCLVKGFYPSDIAVEWESNGQPENNYKTTPPVLDSDGSFFLYSKLTVDKSRWQQGNVFSCSVMHEALHNHYTQKSLSLSPGKHHHHHH

SEQ ID NO: 112 - protein, 482 aa, Equus caballus
  misc_feature (1)..(482): Equine IL4R-ECD_ C HuFc_His6 with leader
MPSSVSWGILLLAGLCCLVPVSLAVKVLRLTACFSDYISASTCEWKMDRPTNCSAQLRLSYQLNDEFSDNLTCIPENREDEVCVCRMLMDNIVSEDVYELDLWAGNQLLWNSSFKPSRHVKPRAPQNLTVHAISHTWLLTWSNPYPLKNHLWSELTYLVNISKEDDPTDFKIYNVTYMDPTLRVTASTLKSRATYSARVKARAQNYNSTWSEWSPSTTWHNYYEQPLEQRGGGSGGGSENLYFQGPKSCDKTHTCPPCPAPELLGGPSVFLFPPKPKDTLMISRTPEVTCVVVDVSHEDPEVKFNWYVDGVEVHNAKTKPREEQYNSTYRVVSVLTVLHQDWLNGKEYKCKVSNKALPAPIEKTISKAKGQPREPQVYTLPPSRDELTKNQVSLTCLVKGFYPSDIAVEWESNGQPENNYKTTPPVLDSDGSFFLYSKLTVDKSRWQQGNVFSCSVMHEALHNHYTQKSLSLSPGKHHHHHH

SEQ ID NO: 113 - protein, 458 aa, Equus caballus
  misc_feature (1)..(458): Equine IL4R-ECD_ C HuFc_His6
VKVLRLTACFSDYISASTCEWKMDRPTNCSAQLRLSYQLNDEFSDNLTCIPENREDEVCVCRMLMDNIVSEDVYELDLWAGNQLLWNSSFKPSRHVKPRAPQNLTVHAISHTWLLTWSNPYPLKNHLWSELTYLVNISKEDDPTDFKIYNVTYMDPTLRVTASTLKSRATYSARVKARAQNYNSTWSEWSPSTTWHNYYEQPLEQRGGGSGGGSENLYFQGPKSCDKTHTCPPCPAPELLGGPSVFLFPPKPKDTLMISRTPEVTCVVVDVSHEDPEVKFNWYVDGVEVHNAKTKPREEQYNSTYRVVSVLTVLHQDWLNGKEYKCKVSNKALPAPIEKTISKAKGQPREPQVYTLPPSRDELTKNQVSLTCLVKGFYPSDIAVEWESNGQPENNYKTTPPVLDSDGSFFLYSKLTVDKSRWQQGNVFSCSVMHEALHNHYTQKSLSLSPGKHHHHHH

SEQ ID NO: 114 - protein, 507 aa, Mus musculus
  misc_feature (1)..(507): Murine IL4R-ECD_ C HuFc_His6 with leader
MGWLCSGLLFPVSCLVLLQVASSIKVLGEPTCFSDYIRTSTCEWFLDSAVDCSSQLCLHYRLMFFEFSENLTCIPRNSASTVCVCHMEMNRPVQSDRYQMELWAEHRQLWQGSFSPSGNVKPLAPDNLTLHTNVSDEWLLTWNNLYPSNNLLYKDLISMVNISREDNPAEFIVYNVTYKEPRLSFPINILMSGVYYTARVRVRSQILTGTWSEWSPSITWYNHFQLPLIQRLPLGVTISCLCIPLFCLFCYFSITKIKKIWGSENLYFQGPKSCDKTHTCPPCPAPELLGGPSVFLFPPKPKDTLMISRTPEVTCVVVDVSHEDPEVKFNWYVDGVEVHNAKTKPREEQYNSTYRVVSVLTVLHQDWLNGKEYKCKVSNKALPAPIEKTISKAKGQPREPQVYTLPPSRDELTKNQVSLTCLVKGFYPSDIAVEWESNGQPENNYKTTPPVLDSDGSFFLYSKLTVDKSRWQQGNVFSCSVMHEALHNHYTQKSLSLSPGKHHHHHH

SEQ ID NO: 115 - protein, 484 aa, Mus musculus
  misc_feature (1)..(484): Murine IL4R-ECD_ C HuFc_His6
IKVLGEPTCFSDYIRTSTCEWFLDSAVDCSSQLCLHYRLMFFEFSENLTCIPRNSASTVCVCHMEMNRPVQSDRYQMELWAEHRQLWQGSFSPSGNVKPLAPDNLTLHTNVSDEWLLTWNNLYPSNNLLYKDLISMVNISREDNPAEFIVYNVTYKEPRLSFPINILMSGVYYTARVRVRSQILTGTWSEWSPSITWYNHFQLPLIQRLPLGVTISCLCIPLFCLFCYFSITKIKKIWGSENLYFQGPKSCDKTHTCPPCPAPELLGGPSVFLFPPKPKDTLMISRTPEVTCVVVDVSHEDPEVKFNWYVDGVEVHNAKTKPREEQYNSTYRVVSVLTVLHQDWLNGKEYKCKVSNKALPAPIEKTISKAKGQPREPQVYTLPPSRDELTKNQVSLTCLVKGFYPSDIAVEWESNGQPENNYKTTPPVLDSDGSFFLYSKLTVDKSRWQQGNVFSCSVMHEALHNHYTQKSLSLSPGKHHHHHH

SEQ ID NO: 116 - protein, 478 aa, Homo sapiens
  misc_feature (1)..(478): Human IL4R-ECD_ C HuFc_His6  with leader
MGWLCSGLLFPVSCLVLLQVASSGNMKVLQEPTCVSDYMSISTCEWKMNGPTNCSTELRLLYQLVFLLSEAHTCIPENNGGAGCVCHLLMDDVVSADNYTLDLWAGQQLLWKGSFKPSEHVKPRAPGNLTVHTNVSDTLLLTWSNPYPPDNYLYNHLTYAVNIWSENDPADFRIYNVTYLEPSLRIAASTLKSGISYRARVRAWAQCYNTTWSEWSPSTKWHNSYREPFEQHGSENLYFQGPKSCDKTHTCPPCPAPELLGGPSVFLFPPKPKDTLMISRTPEVTCVVVDVSHEDPEVKFNWYVDGVEVHNAKTKPREEQYNSTYRVVSVLTVLHQDWLNGKEYKCKVSNKALPAPIEKTISKAKGQPREPQVYTLPPSRDELTKNQVSLTCLVKGFYPSDIAVEWESNGQPENNYKTTPPVLDSDGSFFLYSKLTVDKSRWQQGNVFSCSVMHEALHNHYTQKSLSLSPGKHHHHHH

SEQ ID NO: 117 - protein, 455 aa, Homo sapiens
  misc_feature (1)..(455): Human IL4R-ECD_ C HuFc_His6
GNMKVLQEPTCVSDYMSISTCEWKMNGPTNCSTELRLLYQLVFLLSEAHTCIPENNGGAGCVCHLLMDDVVSADNYTLDLWAGQQLLWKGSFKPSEHVKPRAPGNLTVHTNVSDTLLLTWSNPYPPDNYLYNHLTYAVNIWSENDPADFRIYNVTYLEPSLRIAASTLKSGISYRARVRAWAQCYNTTWSEWSPSTKWHNSYREPFEQHGSENLYFQGPKSCDKTHTCPPCPAPELLGGPSVFLFPPKPKDTLMISRTPEVTCVVVDVSHEDPEVKFNWYVDGVEVHNAKTKPREEQYNSTYRVVSVLTVLHQDWLNGKEYKCKVSNKALPAPIEKTISKAKGQPREPQVYTLPPSRDELTKNQVSLTCLVKGFYPSDIAVEWESNGQPENNYKTTPPVLDSDGSFFLYSKLTVDKSRWQQGNVFSCSVMHEALHNHYTQKSLSLSPGKHHHHHH

SEQ ID NO: 118 - protein, 132 aa, Canis lupus familiaris
  misc_feature (1)..(132): Canine IL4 precursor  NCBI Ref: NP_001003159.1
MGLTSQLIPTLVCLLALTSTFVHGHNFNITIKEIIKMLNILTARNDSCMELTVKDVFTAPKNTSDKEIFCRAATVLRQIYTHNCSNRYLRGLYRNLSSMANKTCSMNEIKKSTLKDFLERLKVIMQKKYYRH

SEQ ID NO: 119 - protein, 133 aa, Felis catus
  misc_feature (1)..(133): Feline IL4 precursor  UniProtKB/Swiss-Prot Ref: P55030.1
MGLTYQLIPALVCLLAFTSTFVHGQNFNNTLKEIIKTLNILTARNDSCMELTVMDVLAAPKNTSDKEIFCRATTVLRQIYTHHNCSTKFLKGLDRNLSSMANRTCSVNEVKKCTLKDFLERLKAIMQKKYSKH

SEQ ID NO: 120 - protein, 137 aa, Equus caballus
  misc_feature (1)..(137): Equine IL4 precursor NCBI Ref: NP_001075988.1
MGLTYQLIPALVCLLACTSNFIQGCKYDITLQEIIKTLNNLTDGKGKNSCMELTVADAFAGPKNTDGKEICRAAKVLQQLYKRHDRSLIKECLSGLDRNLKGMANGTCCTVNEAKKSTLKDFLERLKTIMKEKYSKC

SEQ ID NO: 121 - protein, 132 aa, Canis lupus familiaris; identical to SEQ ID NO: 118
  misc_feature (1)..(132): Canine IL4 precursor NCBI Ref:  NP_001003159.1

SEQ ID NO: 122 - protein, 133 aa, Felis catus
  misc_feature (1)..(133): Feline IL4 precursor NCBI Ref: NP_001036804.1
MDLTSQLIPALVCLLAFTSTFVHGQNFNNTLKEIIKTLNILTARNDSCMELTVMDVLAAPKNTSDKEIFCRATTVLRQIYTHHNCSTKFLKGLDRNLSSMANRTCSVNEVKKCTLKDFLERLKAIMQKKYSKH

SEQ ID NO: 123 - protein, 139 aa, Equus caballus
  misc_feature (1)..(139): Predicted Equine IL4 precursor NCBI Ref: XP_008536927.1
MGLISQLIPALVCLLACTSNFIQGCKYDITLQEIIKTLNNLTDGKGKNSCMELTVADAFAGPKNTDGKEICRAAKVLQQLYKRHDRSLIKECLSGLDRNLKGMANGTCCTVNEAKKSTLKDFLERLKTIMKEKYSKCQS

SEQ ID NO: 124 - protein, 151 aa, Canis lupus familiaris
  misc_feature (1)..(151): Canine IL4_N-His6 with leader
MGLTSQLIPTLVCLLALTSTFVHGSSHHHHHHSSGLVPRGSHMHNFNITIKEIIKMLNILTARNDSCMELTVKDVFTAPKNTSDKEIFCRAATVLRQIYTHNCSNRYLRGLYRNLSSMANKTCSMNEIKKSTLKDFLERLKVIMQKKYYRH

SEQ ID NO: 125 - protein, 126 aa, Canis lupus familiaris
  misc_feature (1)..(126): Canine IL4_N-His6
SHHHHHHSSGLVPRGSHMHNFNITIKEIIKMLNILTARNDSCMELTVKDVFTAPKNTSDKEIFCRAATVLRQIYTHNCSNRYLRGLYRNLSSMANKTCSMNEIKKSTLKDFLERLKVIMQKKYYRH

SEQ ID NO: 126 - protein, 137 aa, Canis lupus familiaris
  misc_feature (1)..(137): Canine IL4_C-His6 with leader
MGLTSQLIPTLVCLLALTSTFVHGHNFNITIKEIIKMLNILTARNDSCMELTVKDVFTAPKNTSDKEIFCRAATVLRQIYTHNCSNRYLRGLYRNLSSMANKTCSMNEIKKSTLKDFLERLKVIMQKKYYRHHHHHH

SEQ ID NO: 127 - protein, 117 aa, Canis lupus familiaris
  misc_feature (1)..(117): Canine IL4_C-His6
HNFNITIKEIIKMLNILTARNDSCMELTVKDVFTAPKNTSDKEIFCRAATVLRQIYTHNCSNRYLRGLYRNLSSMANKTCSMNEIKKSTLKDFLERLKVIMQKKYYRGSGSHHHHHH

SEQ ID NO: 128 - protein, 143 aa, Felis catus
  misc_feature (1)..(143): Feline IL4_C-His6 with leader
MDLTSQLIPALVCLLAFTSTFVHGQNFNNTLKEIIKTLNILTARNDSCMELTVMDVLAAPKNTSDKEIFCRATTVLRQIYTHHNCSTKFLKGLDRNLSSMANRTCSVNEVKKCTLKDFLERLKAIMQKKYSKHGSGSHHHHHH

SEQ ID NO: 129 - protein, 119 aa, Felis catus
  misc_feature (1)..(119): Feline IL4_C-His6
QNFNNTLKEIIKTLNILTARNDSCMELTVMDVLAAPKNTSDKEIFCRATTVLRQIYTHHNCSTKFLKGLDRNLSSMANRTCSVNEVKKCTLKDFLERLKAIMQKKYSKHGSGSHHHHHH

SEQ ID NO: 130 - protein, 148 aa, Equus caballus
  misc_feature (1)..(148): Equine IL4_C-His6 with leader
MGLISQLIPALVCLLACTSNFIQGCKYDITLQEIIKTLNNLTDGKGKNSCMELTVADAFAGPKNTDGKEICRAAKVLQQLYKRHDRSLIKECLSGLDRNLKGMANGTCCTVNEAKKSTLKDFLERLKTIMKEKYSKCQGSGSHHHHHH

SEQ ID NO: 131 - protein, 124 aa, Equus caballus
  misc_feature (1)..(124): Equine IL4_C-His6
CKYDITLQEIIKTLNNLTDGKGKNSCMELTVADAFAGPKNTDGKEICRAAKVLQQLYKRHDRSLIKECLSGLDRNLKGMANGTCCTVNEAKKSTLKDFLERLKTIMKEKYSKCQGSGSHHHHHH

SEQ ID NO: 132 - protein, 22 aa, Artificial Sequence
  Synthetic: exemplary leader sequence
MDMRVPAQLLGLLLLWLRGARC

SEQ ID NO: 133 - protein, 455 aa, Artificial Sequence
  Synthetic: Canine/Human IL4R-ECD_ C-HuFc_His6_ Hybrid1 (Hybrid 1)
GSVKVLHEPSCFSDYISTSVCQWKMDHPTNCSAELRLSYQLDFMGSENHTCVPENNGGAGCVCHLLMDDVVSADNYTLDLWAGQQLLWKGSFKPSEHVKPRAPGNLTVHTNVSDTLLLTWSNPYPPDNYLYNHLTYAVNIWSENDPADFRIYNVTYLEPSLRIAASTLKSGISYRARVRAWAQCYNTTWSEWSPSTKWHNSYREPFEQHGSENLYFQGPKSCDKTHTCPPCPAPELLGGPSVFLFPPKPKDTLMISRTPEVTCVVVDVSHEDPEVKFNWYVDGVEVHNAKTKPREEQYNSTYRVVSVLTVLHQDWLNGKEYKCKVSNKALPAPIEKTISKAKGQPREPQVYTLPPSRDELTKNQVSLTCLVKGFYPSDIAVEWESNGQPENNYKTTPPVLDSDGSFFLYSKLTVDKSRWQQGNVFSCSVMHEALHNHYTQKSLSLSPGKHHHHHH

SEQ ID NO: 134 - protein, 455 aa, Artificial Sequence
  Synthetic: Canine/Human IL4R-ECD_ C-HuFc_His6_ Hybrid2 (Hybrid 2)
GNMKVLQEPTCVSDYMSISTCEWKMNGPTNCSTELRLLYQLVFLLSEAHTCIPENREDSVCVCSMPIDDAVEADVYQLDLWAGQQLLWSGSFQPSKHVKPRTPGNLTVHTNVSDTLLLTWSNPYPPDNYLYNHLTYAVNIWSENDPADFRIYNVTYLEPSLRIAASTLKSGISYRARVRAWAQCYNTTWSEWSPSTKWHNSYREPFEQHGSENLYFQGPKSCDKTHTCPPCPAPELLGGPSVFLFPPKPKDTLMISRTPEVTCVVVDVSHEDPEVKFNWYVDGVEVHNAKTKPREEQYNSTYRVVSVLTVLHQDWLNGKEYKCKVSNKALPAPIEKTISKAKGQPREPQVYTLPPSRDELTKNQVSLTCLVKGFYPSDIAVEWESNGQPENNYKTTPPVLDSDGSFFLYSKLTVDKSRWQQGNVFSCSVMHEALHNHYTQKSLSLSPGKHHHHHH

SEQ ID NO: 135 - protein, 450 aa, Artificial Sequence
  Synthetic: Canine/Human IL4R-ECD_ C-HuFc_His6_ Hybrid3 (Hybrid 3)
GNMKVLQEPTCVSDYMSISTCEWKMNGPTNCSTELRLLYQLVFLLSEAHTCIPENNGGAGCVCHLLMDDVVSADNYTLDLWAGQQLLWKGSFKPSEHVKPRAPGNLTVHPNISHTWLLMWTNPYPTENHLHSELTYMVNVSNDNDPEDFKVYNVTYMGPTLRLAASTLKSGASYSARVRAWAQTYNSTWSDWSPSTTWLNYYEPGSENLYFQGPKSCDKTHTCPPCPAPELLGGPSVFLFPPKPKDTLMISRTPEVTCVVVDVSHEDPEVKFNWYVDGVEVHNAKTKPREEQYNSTYRVVSVLTVLHQDWLNGKEYKCKVSNKALPAPIEKTISKAKGQPREPQVYTLPPSRDELTKNQVSLTCLVKGFYPSDIAVEWESNGQPENNYKTTPPVLDSDGSFFLYSKLTVDKSRWQQGNVFSCSVMHEALHNHYTQKSLSLSPGKHHHHHH

SEQ ID NO: 136 - protein, 455 aa, Artificial Sequence
  Synthetic: Canine/Human IL4R-ECD_ C-HuFc_His6_ Hybrid4 (Hybrid 4)
GSVKVLHEPSCFSDYISTSVCQWKMDHPTNCSAELRLSYQLDFMGSENHTCVPENREDSVCVCSMPIDDAVEADVYQLDLWAGQQLLWSGSFQPSKHVKPRTPGNLTVHTNVSDTLLLTWSNPYPPDNYLYNHLTYAVNIWSENDPADFRIYNVTYLEPSLRIAASTLKSGISYRARVRAWAQCYNTTWSEWSPSTKWHNSYREPFEQHGSENLYFQGPKSCDKTHTCPPCPAPELLGGPSVFLFPPKPKDTLMISRTPEVTCVVVDVSHEDPEVKFNWYVDGVEVHNAKTKPREEQYNSTYRVVSVLTVLHQDWLNGKEYKCKVSNKALPAPIEKTISKAKGQPREPQVYTLPPSRDELTKNQVSLTCLVKGFYPSDIAVEWESNGQPENNYKTTPPVLDSDGSFFLYSKLTVDKSRWQQGNVFSCSVMHEALHNHYTQKSLSLSPGKHHHHHH

SEQ ID NO: 137 - protein, 450 aa, Artificial Sequence
  Synthetic: Canine/Human IL4R-ECD_ C-HuFc_His6_ Hybrid5 (Hybrid 5)
GNMKVLQEPTCVSDYMSISTCEWKMNGPTNCSTELRLLYQLVFLLSEAHTCIPENREDSVCVCSMPIDDAVEADVYQLDLWAGQQLLWSGSFQPSKHVKPRTPGNLTVHPNISHTWLLMWTNPYPTENHLHSELTYMVNVSNDNDPEDFKVYNVTYMGPTLRLAASTLKSGASYSARVRAWAQTYNSTWSDWSPSTTWLNYYEPGSENLYFQGPKSCDKTHTCPPCPAPELLGGPSVFLFPPKPKDTLMISRTPEVTCVVVDVSHEDPEVKFNWYVDGVEVHNAKTKPREEQYNSTYRVVSVLTVLHQDWLNGKEYKCKVSNKALPAPIEKTISKAKGQPREPQVYTLPPSRDELTKNQVSLTCLVKGFYPSDIAVEWESNGQPENNYKTTPPVLDSDGSFFLYSKLTVDKSRWQQGNVFSCSVMHEALHNHYTQKSLSLSPGKHHHHHH

SEQ ID NO: 138 - protein, 450 aa, Artificial Sequence
  Synthetic: Canine/Human IL4R-ECD_ C-HuFc_His6_ Hybrid6 (Hybrid 6)
GSVKVLHEPSCFSDYISTSVCQWKMDHPTNCSAELRLSYQLDFMGSENHTCVPENNGGAGCVCHLLMDDVVSADNYTLDLWAGQQLLWKGSFKPSEHVKPRAPGNLTVHPNISHTWLLMWTNPYPTENHLHSELTYMVNVSNDNDPEDFKVYNVTYMGPTLRLAASTLKSGASYSARVRAWAQTYNSTWSDWSPSTTWLNYYEPGSENLYFQGPKSCDKTHTCPPCPAPELLGGPSVFLFPPKPKDTLMISRTPEVTCVVVDVSHEDPEVKFNWYVDGVEVHNAKTKPREEQYNSTYRVVSVLTVLHQDWLNGKEYKCKVSNKALPAPIEKTISKAKGQPREPQVYTLPPSRDELTKNQVSLTCLVKGFYPSDIAVEWESNGQPENNYKTTPPVLDSDGSFFLYSKLTVDKSRWQQGNVFSCSVMHEALHNHYTQKSLSLSPGKHHHHHH

SEQ ID NO: 139 - protein, 450 aa, Artificial Sequence
  Synthetic: Canine/Human IL4R-ECD_ C-HuFc_His6_ Hybrid7 (Hybrid 7)
GNMKVLQEPTCVSDYMSISTCEWKMNGPTNCSAELRLSYQLDFMGSENHTCVPENREDSVCVCSMPIDDAVEADVYQLDLWAGQQLLWSGSFQPSKHVKPRTPGNLTVHPNISHTWLLMWTNPYPTENHLHSELTYMVNVSNDNDPEDFKVYNVTYMGPTLRLAASTLKSGASYSARVRAWAQTYNSTWSDWSPSTTWLNYYEPGSENLYFQGPKSCDKTHTCPPCPAPELLGGPSVFLFPPKPKDTLMISRTPEVTCVVVDVSHEDPEVKFNWYVDGVEVHNAKTKPREEQYNSTYRVVSVLTVLHQDWLNGKEYKCKVSNKALPAPIEKTISKAKGQPREPQVYTLPPSRDELTKNQVSLTCLVKGFYPSDIAVEWESNGQPENNYKTTPPVLDSDGSFFLYSKLTVDKSRWQQGNVFSCSVMHEALHNHYTQKSLSLSPGKHHHHHH

SEQ ID NO: 140 - protein, 450 aa, Artificial Sequence
  Synthetic: Canine/Human IL4R-ECD_ C-HuFc_His6_ Fusion8 (Fusion 8)
GSVKVLHEPSCFSDYISTSVCQWKMDHPTNCSTELRLLYQLVFLLSEAHTCIPENREDSVCVCSMPIDDAVEADVYQLDLWAGQQLLWSGSFQPSKHVKPRTPGNLTVHPNISHTWLLMWTNPYPTENHLHSELTYMVNVSNDNDPEDFKVYNVTYMGPTLRLAASTLKSGASYSARVRAWAQTYNSTWSDWSPSTTWLNYYEPGSENLYFQGPKSCDKTHTCPPCPAPELLGGPSVFLFPPKPKDTLMISRTPEVTCVVVDVSHEDPEVKFNWYVDGVEVHNAKTKPREEQYNSTYRVVSVLTVLHQDWLNGKEYKCKVSNKALPAPIEKTISKAKGQPREPQVYTLPPSRDELTKNQVSLTCLVKGFYPSDIAVEWESNGQPENNYKTTPPVLDSDGSFFLYSKLTVDKSRWQQGNVFSCSVMHEALHNHYTQKSLSLSPGKHHHHHH

SEQ ID NO: 141 - protein, 450 aa, Artificial Sequence
  Synthetic: Canine/Human IL4R-ECD_ C-HuFc_His6_ Hybrid9 (Hybrid 9)
GSVKVLHEPSCFSDYISTSVCQWKMDHPTNCSTELRLLYQLDFMGSENHTCVPENREDSVCVCSMPIDDAVEADVYQLDLWAGQQLLWSGSFQPSKHVKPRTPGNLTVHPNISHTWLLMWTNPYPTENHLHSELTYMVNVSNDNDPEDFKVYNVTYMGPTLRLAASTLKSGASYSARVRAWAQTYNSTWSDWSPSTTWLNYYEPGSENLYFQGPKSCDKTHTCPPCPAPELLGGPSVFLFPPKPKDTLMISRTPEVTCVVVDVSHEDPEVKFNWYVDGVEVHNAKTKPREEQYNSTYRVVSVLTVLHQDWLNGKEYKCKVSNKALPAPIEKTISKAKGQPREPQVYTLPPSRDELTKNQVSLTCLVKGFYPSDIAVEWESNGQPENNYKTTPPVLDSDGSFFLYSKLTVDKSRWQQGNVFSCSVMHEALHNHYTQKSLSLSPGKHHHHHH

SEQ ID NO: 142 - protein, 450 aa, Artificial Sequence
  Synthetic: Canine/Human IL4R-ECD_ C HuFc_His6_ Hybrid10  (Hybrid 10)
GSVKVLHEPSCFSDYISTSVCQWKMDHPTNCSAELRLSYQLVFLLSEAHTCIPENREDSVCVCSMPIDDAVEADVYQLDLWAGQQLLWSGSFQPSKHVKPRTPGNLTVHPNISHTWLLMWTNPYPTENHLHSELTYMVNVSNDNDPEDFKVYNVTYMGPTLRLAASTLKSGASYSARVRAWAQTYNSTWSDWSPSTTWLNYYEPGSENLYFQGPKSCDKTHTCPPCPAPELLGGPSVFLFPPKPKDTLMISRTPEVTCVVVDVSHEDPEVKFNWYVDGVEVHNAKTKPREEQYNSTYRVVSVLTVLHQDWLNGKEYKCKVSNKALPAPIEKTISKAKGQPREPQVYTLPPSRDELTKNQVSLTCLVKGFYPSDIAVEWESNGQPENNYKTTPPVLDSDGSFFLYSKLTVDKSRWQQGNVFSCSVMHEALHNHYTQKSLSLSPGKHHHHHH

SEQ ID NO: 143 - protein, 450 aa, Artificial Sequence
  Synthetic: Canine/Human IL4R-ECD_ C HuFc_His6_ Hybrid11 (Hybrid 11)
GSVKVLHEPSCFSDYISTSVCQWKMDHPTNCSAELRLSYQLDFMGSENHTCVPENNGGAGCVCHLLMDDVVEADVYQLDLWAGQQLLWSGSFQPSKHVKPRTPGNLTVHPNISHTWLLMWTNPYPTENHLHSELTYMVNVSNDNDPEDFKVYNVTYMGPTLRLAASTLKSGASYSARVRAWAQTYNSTWSDWSPSTTWLNYYEPGSENLYFQGPKSCDKTHTCPPCPAPELLGGPSVFLFPPKPKDTLMISRTPEVTCVVVDVSHEDPEVKFNWYVDGVEVHNAKTKPREEQYNSTYRVVSVLTVLHQDWLNGKEYKCKVSNKALPAPIEKTISKAKGQPREPQVYTLPPSRDELTKNQVSLTCLVKGFYPSDIAVEWESNGQPENNYKTTPPVLDSDGSFFLYSKLTVDKSRWQQGNVFSCSVMHEALHNHYTQKSLSLSPGKHHHHHH

SEQ ID NO: 144 - protein, 450 aa, Artificial Sequence
  Synthetic: Canine/Human IL4R-ECD_C HuFc_His6_ Hybrid12 (Hybrid 12)
GSVKVLHEPSCFSDYISTSVCQWKMDHPTNCSAELRLSYQLDFMGSENHTCVPENREDSVCVCSMPIDDAVSADNYTLDLWAGQQLLWKGSFQPSKHVKPRTPGNLTVHPNISHTWLLMWTNPYPTENHLHSELTYMVNVSNDNDPEDFKVYNVTYMGPTLRLAASTLKSGASYSARVRAWAQTYNSTWSDWSPSTTWLNYYEPGSENLYFQGPKSCDKTHTCPPCPAPELLGGPSVFLFPPKPKDTLMISRTPEVTCVVVDVSHEDPEVKFNWYVDGVEVHNAKTKPREEQYNSTYRVVSVLTVLHQDWLNGKEYKCKVSNKALPAPIEKTISKAKGQPREPQVYTLPPSRDELTKNQVSLTCLVKGFYPSDIAVEWESNGQPENNYKTTPPVLDSDGSFFLYSKLTVDKSRWQQGNVFSCSVMHEALHNHYTQKSLSLSPGKHHHHHH

SEQ ID NO: 145 - protein, 450 aa, Artificial Sequence
  Synthetic: Canine/Human IL4R-ECD_C HuFc_His6_ Hybrid13 (Hybrid 13)
GSVKVLHEPSCFSDYISTSVCQWKMDHPTNCSAELRLSYQLDFMGSENHTCVPENREDSVCVCSMPIDDAVEADVYQLDLWAGQQLLWSGSFKPSEHVKPRAPGNLTVHPNISHTWLLMWTNPYPTENHLHSELTYMVNVSNDNDPEDFKVYNVTYMGPTLRLAASTLKSGASYSARVRAWAQTYNSTWSDWSPSTTWLNYYEPGSENLYFQGPKSCDKTHTCPPCPAPELLGGPSVFLFPPKPKDTLMISRTPEVTCVVVDVSHEDPEVKFNWYVDGVEVHNAKTKPREEQYNSTYRVVSVLTVLHQDWLNGKEYKCKVSNKALPAPIEKTISKAKGQPREPQVYTLPPSRDELTKNQVSLTCLVKGFYPSDIAVEWESNGQPENNYKTTPPVLDSDGSFFLYSKLTVDKSRWQQGNVFSCSVMHEALHNHYTQKSLSLSPGKHHHHHH

SEQ ID NO: 146 - protein, 450 aa, Artificial Sequence
  Synthetic: Canine/Human IL4R-ECD_ C HuFc_His6_ Hybrid14 (Hybrid 14)
GSVKVLHEPSCFSDYISTSVCQWKMDHPTNCSAELRLSYQLDFMGSENHTCVPENREDSVCVCSMPIDDVVSADNYTLDLWAGQQLLWKGSFKPSKHVKPRTPGNLTVHPNISHTWLLMWTNPYPTENHLHSELTYMVNVSNDNDPEDFKVYNVTYMGPTLRLAASTLKSGASYSARVRAWAQTYNSTWSDWSPSTTWLNYYEPGSENLYFQGPKSCDKTHTCPPCPAPELLGGPSVFLFPPKPKDTLMISRTPEVTCVVVDVSHEDPEVKFNWYVDGVEVHNAKTKPREEQYNSTYRVVSVLTVLHQDWLNGKEYKCKVSNKALPAPIEKTISKAKGQPREPQVYTLPPSRDELTKNQVSLTCLVKGFYPSDIAVEWESNGQPENNYKTTPPVLDSDGSFFLYSKLTVDKSRWQQGNVFSCSVMHEALHNHYTQKSLSLSPGKHHHHHH

SEQ ID NO: 147 - protein, 450 aa, Artificial Sequence
  Synthetic: Canine IL4R-ECD_ C HuFc_His6.A33T (Mutant 1)
GSVKVLHEPSCFSDYISTSVCQWKMDHPTNCSTELRLSYQLDFMGSENHTCVPENREDSVCVCSMPIDDAVEADVYQLDLWAGQQLLWSGSFQPSKHVKPRTPGNLTVHPNISHTWLLMWTNPYPTENHLHSELTYMVNVSNDNDPEDFKVYNVTYMGPTLRLAASTLKSGASYSARVRAWAQTYNSTWSDWSPSTTWLNYYEPGSENLYFQGPKSCDKTHTCPPCPAPELLGGPSVFLFPPKPKDTLMISRTPEVTCVVVDVSHEDPEVKFNWYVDGVEVHNAKTKPREEQYNSTYRVVSVLTVLHQDWLNGKEYKCKVSNKALPAPIEKTISKAKGQPREPQVYTLPPSRDELTKNQVSLTCLVKGFYPSDIAVEWESNGQPENNYKTTPPVLDSDGSFFLYSKLTVDKSRWQQGNVFSCSVMHEALHNHYTQKSLSLSPGKHHHHHH

SEQ ID NO: 148 - protein, 450 aa, Artificial Sequence
  Synthetic: Canine IL4R-ECD_ C HuFc_His6.M44A (Mutant 2)
GSVKVLHEPSCFSDYISTSVCQWKMDHPTNCSAELRLSYQLDFAGSENHTCVPENREDSVCVCSMPIDDAVEADVYQLDLWAGQQLLWSGSFQPSKHVKPRTPGNLTVHPNISHTWLLMWTNPYPTENHLHSELTYMVNVSNDNDPEDFKVYNVTYMGPTLRLAASTLKSGASYSARVRAWAQTYNSTWSDWSPSTTWLNYYEPGSENLYFQGPKSCDKTHTCPPCPAPELLGGPSVFLFPPKPKDTLMISRTPEVTCVVVDVSHEDPEVKFNWYVDGVEVHNAKTKPREEQYNSTYRVVSVLTVLHQDWLNGKEYKCKVSNKALPAPIEKTISKAKGQPREPQVYTLPPSRDELTKNQVSLTCLVKGFYPSDIAVEWESNGQPENNYKTTPPVLDSDGSFFLYSKLTVDKSRWQQGNVFSCSVMHEALHNHYTQKSLSLSPGKHHHHHH

SEQ ID NO: 149 - protein, 450 aa, Artificial Sequence
  Synthetic: Canine IL4R-ECD_ C HuFc_His6.G45A (Mutant 3)
GSVKVLHEPSCFSDYISTSVCQWKMDHPTNCSAELRLSYQLDFMASENHTCVPENREDSVCVCSMPIDDAVEADVYQLDLWAGQQLLWSGSFQPSKHVKPRTPGNLTVHPNISHTWLLMWTNPYPTENHLHSELTYMVNVSNDNDPEDFKVYNVTYMGPTLRLAASTLKSGASYSARVRAWAQTYNSTWSDWSPSTTWLNYYEPGSENLYFQGPKSCDKTHTCPPCPAPELLGGPSVFLFPPKPKDTLMISRTPEVTCVVVDVSHEDPEVKFNWYVDGVEVHNAKTKPREEQYNSTYRVVSVLTVLHQDWLNGKEYKCKVSNKALPAPIEKTISKAKGQPREPQVYTLPPSRDELTKNQVSLTCLVKGFYPSDIAVEWESNGQPENNYKTTPPVLDSDGSFFLYSKLTVDKSRWQQGNVFSCSVMHEALHNHYTQKSLSLSPGKHHHHHH

SEQ ID NO: 150 - protein, 450 aa, Artificial Sequence
  Synthetic: Canine IL4R-ECD_ C HuFc_His6.N48A (Mutant 4)
GSVKVLHEPSCFSDYISTSVCQWKMDHPTNCSAELRLSYQLDFMGSEAHTCVPENREDSVCVCSMPIDDAVEADVYQLDLWAGQQLLWSGSFQPSKHVKPRTPGNLTVHPNISHTWLLMWTNPYPTENHLHSELTYMVNVSNDNDPEDFKVYNVTYMGPTLRLAASTLKSGASYSARVRAWAQTYNSTWSDWSPSTTWLNYYEPGSENLYFQGPKSCDKTHTCPPCPAPELLGGPSVFLFPPKPKDTLMISRTPEVTCVVVDVSHEDPEVKFNWYVDGVEVHNAKTKPREEQYNSTYRVVSVLTVLHQDWLNGKEYKCKVSNKALPAPIEKTISKAKGQPREPQVYTLPPSRDELTKNQVSLTCLVKGFYPSDIAVEWESNGQPENNYKTTPPVLDSDGSFFLYSKLTVDKSRWQQGNVFSCSVMHEALHNHYTQKSLSLSPGKHHHHHH

SEQ ID NO: 151 - protein, 450 aa, Artificial Sequence
  Synthetic: Canine IL4R-ECD_ C HuFc_His6.S38A (Mutant 5)
GSVKVLHEPSCFSDYISTSVCQWKMDHPTNCSAELRLAYQLDFMGSENHTCVPENREDSVCVCSMPIDDAVEADVYQLDLWAGQQLLWSGSFQPSKHVKPRTPGNLTVHPNISHTWLLMWTNPYPTENHLHSELTYMVNVSNDNDPEDFKVYNVTYMGPTLRLAASTLKSGASYSARVRAWAQTYNSTWSDWSPSTTWLNYYEPGSENLYFQGPKSCDKTHTCPPCPAPELLGGPSVFLFPPKPKDTLMISRTPEVTCVVVDVSHEDPEVKFNWYVDGVEVHNAKTKPREEQYNSTYRVVSVLTVLHQDWLNGKEYKCKVSNKALPAPIEKTISKAKGQPREPQVYTLPPSRDELTKNQVSLTCLVKGFYPSDIAVEWESNGQPENNYKTTPPVLDSDGSFFLYSKLTVDKSRWQQGNVFSCSVMHEALHNHYTQKSLSLSPGKHHHHHH

SEQ ID NO: 152 - protein, 450 aa, Artificial Sequence
  Synthetic: Canine IL4R-ECD_ C HuFc_His6.D42A  (Mutant 6)
GSVKVLHEPSCFSDYISTSVCQWKMDHPTNCSAELRLSYQLAFMGSENHTCVPENREDSVCVCSMPIDDAVEADVYQLDLWAGQQLLWSGSFQPSKHVKPRTPGNLTVHPNISHTWLLMWTNPYPTENHLHSELTYMVNVSNDNDPEDFKVYNVTYMGPTLRLAASTLKSGASYSARVRAWAQTYNSTWSDWSPSTTWLNYYEPGSENLYFQGPKSCDKTHTCPPCPAPELLGGPSVFLFPPKPKDTLMISRTPEVTCVVVDVSHEDPEVKFNWYVDGVEVHNAKTKPREEQYNSTYRVVSVLTVLHQDWLNGKEYKCKVSNKALPAPIEKTISKAKGQPREPQVYTLPPSRDELTKNQVSLTCLVKGFYPSDIAVEWESNGQPENNYKTTPPVLDSDGSFFLYSKLTVDKSRWQQGNVFSCSVMHEALHNHYTQKSLSLSPGKHHHHHH

SEQ ID NO: 153 - protein, 450 aa, Artificial Sequence
  Synthetic: Canine IL4R-ECD_ C HuFc_His6.H49A  (Mutant 7)
GSVKVLHEPSCFSDYISTSVCQWKMDHPTNCSAELRLSYQLDFMGSENATCVPENREDSVCVCSMPIDDAVEADVYQLDLWAGQQLLWSGSFQPSKHVKPRTPGNLTVHPNISHTWLLMWTNPYPTENHLHSELTYMVNVSNDNDPEDFKVYNVTYMGPTLRLAASTLKSGASYSARVRAWAQTYNSTWSDWSPSTTWLNYYEPGSENLYFQGPKSCDKTHTCPPCPAPELLGGPSVFLFPPKPKDTLMISRTPEVTCVVVDVSHEDPEVKFNWYVDGVEVHNAKTKPREEQYNSTYRVVSVLTVLHQDWLNGKEYKCKVSNKALPAPIEKTISKAKGQPREPQVYTLPPSRDELTKNQVSLTCLVKGFYPSDIAVEWESNGQPENNYKTTPPVLDSDGSFFLYSKLTVDKSRWQQGNVFSCSVMHEALHNHYTQKSLSLSPGKHHHHHH

SEQ ID NO: 154 - protein, 131 aa, Canis lupus familiaris
  misc_feature (1)..(131): Canine IL13 precursor NCBI Ref: NP_001003384
MALWLTVVIALTCLGGLASPSPVTPSPTLKELIEELVNITQNQASLCNGSMVWSVNLTAGMYCAALESLINVSDCSAIQRTQRMLKALCSQKPAAGQISSERSRDTKIEVIQLVKNLLTYVRGVYRHGNFR

SEQ ID NO: 155 - protein, 184 aa, Felis catus
  misc_feature (1)..(184): Feline IL13 precursor NCBI Ref:  XP_006927648
MWFLDSTRQSGDQGGRRHTWPIKATARGQGHKPLSLGQPTCPLLAPPVLALGSMALWLTVVIALTCLGGLASPGPHSRRELKELIEELVNITQNQVSLCNGSMVWSVNLTTGMQYCAALESLINVSDCTAIQRTQRMLKALCTQKPSAGQTASERSRDTKIEVIQLVKNLLNHLRRNFRHGNFK

SEQ ID NO: 156 - protein, 139 aa, Canis lupus familiaris
  misc_feature (1)..(139): Canine IL13_C-His6 with leader
MALWLTVVIALTCLGGLASPSPVTPSPTLKELIEELVNITQNQASLCNGSMVWSVNLTAGMYCAALESLINVSDCSAIQRTQRMLKALCSQKPAAGQISSERSRDTKIEVIQLVKNLLTYVRGVYRHGNFRGSHHHHHH

SEQ ID NO: 157 - protein, 121 aa, Canis lupus familiaris
  misc_feature (1)..(121): Canine IL13_C-His6
SPSPVTPSPTLKELIEELVNITQNQASLCNGSMVWSVNLTAGMYCAALESLINVSDCSAIQRTQRMLKALCSQKPAAGQISSERSRDTKIEVIQLVKNLLTYVRGVYRHGNFRGSHHHHHH

SEQ ID NO: 158 - protein, 144 aa, Felis catus
  misc_feature (1)..(144): Feline IL13_C-His6 with leader
MALWLTVVIALTCLGGLASPGPHSRRELKELIEELVNITQNQLLQVSLCNGSMVWSVNLTTGMQYCAALESLINVSDCTAIQRTQRMLKALCTQKPSAGQTASERSRDTKIEVIQLVKNLLNHLRRNFRHGNFKGSGSHHHHHH

SEQ ID NO: 159 - protein, 126 aa, Felis catus
  misc_feature (1)..(126): Feline IL13_C-His6
SPGPHSRRELKELIEELVNITQNQLLQVSLCNGSMVWSVNLTTGMQYCAALESLINVSDCTAIQRTQRMLKALCTQKPSAGQTASERSRDTKIEVIQLVKNLLNHLRRNFRHGNFKGSGSHHHHHH

SEQ ID NO: 160 - protein, 427 aa, Canis lupus familiaris
  misc_feature (1)..(427): Canine IL13R NCBI Ref: XP_538150.3
MERPARLCGLWALLLCAAGGRGGGVAAPTETQPPVTNLSVSVENLCTVIWTWDPPEGASPNCTLRYFSHFDNKQDKKIAPETHRSKEVPLNERICLQVGSQCSTNESDNPSILVEKCTPPPEGDPESAVTELQCVWHNLSYMKCTWLPGRNTSPDTNYTLYYWHSSLGKILQCEDIYREGQHIGCSFALTNLKDSSFEQHSVQIVVKDNAGKIRPSFNIVPLTSHVKPDPPHIKRLFFQNGNLYVQWKNPQNFYSRCLSYQVEVNNSQTETNDIFYVEEAKCQNSEFEGNLEGTICFMVPGVLPDTLNTVRIRVRTNKLCYEDDKLWSNWSQAMSIGENTDPTFYITMLLATPVIVAGAIIVLLLYLKRLKIIIFPPIPDPGKIFKEMFGDQNDDTLHWRKYDIYEKQTKEETDSVVLIENLKKASQ

SEQ ID NO: 161 - protein, 315 aa, Canis lupus familiaris
  misc_feature (1)..(315): Canine IL13R ECD
TETQPPVTNLSVSVENLCTVIWTWDPPEGASPNCTLRYFSHFDNKQDKKIAPETHRSKEVPLNERICLQVGSQCSTNESDNPSILVEKCTPPPEGDPESAVTELQCVWHNLSYMKCTWLPGRNTSPDTNYTLYYWHSSLGKILQCEDIYREGQHIGCSFALTNLKDSSFEQHSVQIVVKDNAGKIRPSFNIVPLTSHVKPDPPHIKRLFFQNGNLYVQWKNPQNFYSRCLSYQVEVNNSQTETNDIFYVEEAKCQNSEFEGNLEGTICFMVPGVLPDTLNTVRIRVRTNKLCYEDDKLWSNWSQAMSIGENTDPT

SEQ ID NO: 162 - protein, 221 aa, Artificial Sequence
  Synthetic: Exemplary wild-type canine IgG-A Fc   Protein A - C1q - CD16 -
PVPEPLGGPSVLIFPPKPKDILRITRTPEVTCVVLDLGREDPEVQISWFVDGKEVHTAKTQSREQQFNGTYRVVSVLPIEHQDWLTGKEFKCRVNHIDLPSPIERTISKARGRAHKPSVYVLPPSPKELSSSDTVSITCLIKDFYPPDIDVEWQSNGQQEPERKHRMTPPQLDEDGSYFLYSKLSVDKSRWQQGDPFTCAVMHETLQNHYTDLSLSHSPGK

SEQ ID NO: 163 - protein, 220 aa, Artificial Sequence
  Synthetic: Exemplary wild-type canine IgG-B Fc   Protein A + C1q + CD16 +
PAPEMLGGPSVFIFPPKPKDTLLIARTPEVTCVVVDLDPEDPEVQISWFVDGKQMQTAKTQPREEQFNGTYRVVSVLPIGHQDWLKGKQFTCKVNNKALPSPIERTISKARGQAHQPSVYVLPPSREELSKNTVSLTCLIKDFFPPDIDVEWQSNGQQEPESKYRTTPPQLDEDGSYFLYSKLSVDKSRWQRGDTFICAVMHEALHNHYTQESLSHSPGK

SEQ ID NO: 164 - protein, 237 aa, Artificial Sequence
  Synthetic: Exemplary wild-type canine IgG-B Fc with hinge Protein A + C1q + CD16 +
PKRENGRVPRPPDCPKCPAPEMLGGPSVFIFPPKPKDTLLIARTPEVTCVVVDLDPEDPEVQISWFVDGKQMQTAKTQPREEQFNGTYRVVSVLPIGHQDWLKGKQFTCKVNNKALPSPIERTISKARGQAHQPSVYVLPPSREELSKNTVSLTCLIKDFFPPDIDVEWQSNGQQEPESKYRTTPPQLDEDGSYFLYSKLSVDKSRWQRGDTFICAVMHEALHNHYTQESLSHSPGK

SEQ ID NO: 165 - protein, 220 aa, Artificial Sequence
  Synthetic: Exemplary wild-type canine IgG-C Fc   Protein A -  C1q + CD16 +
PGCGLLGGPSVFIFPPKPKDILVTARTPTVTCVVVDLDPENPEVQISWFVDSKQVQTANTQPREEQSNGTYRVVSVLPIGHQDWLSGKQFKCKVNNKALPSPIEEIISKTPGQAHQPNVYVLPPSRDEMSKNTVTLTCLVKDFFPPEIDVEWQSNGQQEPESKYRMTPPQLDEDGSYFLYSKLSVDKSRWQRGDTFICAVMHEALHNHYTQISLSHSPGK

SEQ ID NO: 166 - protein, 235 aa, Artificial Sequence
  Synthetic: Exemplary wild-type canine IgG-C Fc with hinge Protein A -  C1q + CD16 +
AKECECKCNCNNCPCPGCGLLGGPSVFIFPPKPKDILVTARTPTVTCVVVDLDPENPEVQISWFVDSKQVQTANTQPREEQSNGTYRVVSVLPIGHQDWLSGKQFKCKVNNKALPSPIEEIISKTPGQAHQPNVYVLPPSRDEMSKNTVTLTCLVKDFFPPEIDVEWQSNGQQEPESKYRMTPPQLDEDGSYFLYSKLSVDKSRWQRGDTFICAVMHEALHNHYTQISLSHSPGK

SEQ ID NO: 167 - protein, 221 aa, Artificial Sequence
  Synthetic: Exemplary wild-type canine IgG-D Fc   Protein A - C1q - CD16 -
PVPESLGGPSVFIFPPKPKDILRITRTPEITCVVLDLGREDPEVQISWFVDGKEVHTAKTQPREQQFNSTYRVVSVLPIEHQDWLTGKEFKCRVNHIGLPSPIERTISKARGQAHQPSVYVLPPSPKELSSSDTVTLTCLIKDFFPPEIDVEWQSNGQPEPESKYHTTAPQLDEDGSYFLYSKLSVDKSRWQQGDTFTCAVMHEALQNHYTDLSLSHSPGK

SEQ ID NO: 168 - protein, 221 aa, Artificial Sequence
  Synthetic: Exemplary variant canine IgG-A Fc   C1q - Protein A + I(21)T R(23)L T(25)A E(80)G T(205)A Q(207)H
PVPEPLGGPSVLIFPPKPKDTLLIARTPEVTCVVLDLGREDPEVQISWFVDGKEVHTAKTQSREQQFNGTYRVVSVLPIGHQDWLTGKEFKCRVNHIDLPSPIERTISKARGRAHKPSVYVLPPSPKELSSSDTVSITCLIKDFYPPDIDVEWQSNGQQEPERKHRMTPPQLDEDGSYFLYSKLSVDKSRWQQGDPFTCAVMHEALHNHYTDLSLSHSPGK

SEQ ID NO: 169 - protein, 221 aa, Artificial Sequence
  Synthetic: Exemplary variant canine IgG-A Fc   C1q - Protein A + I(21)T Q(207)H
PVPEPLGGPSVLIFPPKPKDTLRITRTPEVTCVVLDLGREDPEVQISWFVDGKEVHTAKTQSREQQFNGTYRVVSVLPIEHQDWLTGKEFKCRVNHIDLPSPIERTISKARGRAHKPSVYVLPPSPKELSSSDTVSITCLIKDFYPPDIDVEWQSNGQQEPERKHRMTPPQLDEDGSYFLYSKLSVDKSRWQQGDPFTCAVMHETLHNHYTDLSLSHSPGK

SEQ ID NO: 170 - protein, 220 aa, Artificial Sequence
  Synthetic: Exemplary variant canine IgG-B Fc  Protein A + C1q - K(93)R
PAPEMLGGPSVFIFPPKPKDTLLIARTPEVTCVVVDLDPEDPEVQISWFVDGKQMQTAKTQPREEQFNGTYRVVSVLPIGHQDWLKGKQFTCRVNNKALPSPIERTISKARGQAHQPSVYVLPPSREELSKNTVSLTCLIKDFFPPDIDVEWQSNGQQEPESKYRTTPPQLDEDGSYFLYSKLSVDKSRWQRGDTFICAVMHEALHNHYTQESLSHSPGK

SEQ ID NO: 171 - protein, 220 aa, Artificial Sequence
  Synthetic: Exemplary variant canine IgG-B Fc  Protein A + C1q + CD16 -  M(5)P
PAPEPLGGPSVFIFPPKPKDTLLIARTPEVTCVVVDLDPEDPEVQISWFVDGKQMQTAKTQPREEQFNGTYRVVSVLPIGHQDWLKGKQFTCKVNNKALPSPIERTISKARGQAHQPSVYVLPPSREELSKNTVSLTCLIKDFFPPDIDVEWQSNGQQEPESKYRTTPPQLDEDGSYFLYSKLSVDKSRWQRGDTFICAVMHEALHNHYTQESLSHSPGK

SEQ ID NO: 172 - protein, 220 aa, Artificial Sequence
  Synthetic: Exemplary variant canine IgG-B Fc  Protein A + C1q + CD16 -  P(39)R
PAPEMLGGPSVFIFPPKPKDTLLIARTPEVTCVVVDLDREDPEVQISWFVDGKQMQTAKTQPREEQFNGTYRVVSVLPIGHQDWLKGKQFTCKVNNKALPSPIERTISKARGQAHQPSVYVLPPSREELSKNTVSLTCLIKDFFPPDIDVEWQSNGQQEPESKYRTTPPQLDEDGSYFLYSKLSVDKSRWQRGDTFICAVMHEALHNHYTQESLSHSPGK

SEQ ID NO: 173 - protein, 220 aa, Artificial Sequence
  Synthetic: Exemplary variant canine IgG-B Fc  Protein A + C1q + CD16 -  D(38)G
PAPEMLGGPSVFIFPPKPKDTLLIARTPEVTCVVVDLGPEDPEVQISWFVDGKQMQTAKTQPREEQFNGTYRVVSVLPIGHQDWLKGKQFTCKVNNKALPSPIERTISKARGQAHQPSVYVLPPSREELSKNTVSLTCLIKDFFPPDIDVEWQSNGQQEPESKYRTTPPQLDEDGSYFLYSKLSVDKSRWQRGDTFICAVMHEALHNHYTQESLSHSPGK

SEQ ID NO: 174 - protein, 220 aa, Artificial Sequence
  Synthetic: Exemplary variant canine IgG-B Fc  Protein A + C1q + CD16 -  K(97)I
PAPEMLGGPSVFIFPPKPKDTLLIARTPEVTCVVVDLDPEDPEVQISWFVDGKQMQTAKTQPREEQFNGTYRVVSVLPIGHQDWLKGKQFTCKVNNIALPSPIERTISKARGQAHQPSVYVLPPSREELSKNTVSLTCLIKDFFPPDIDVEWQSNGQQEPESKYRTTPPQLDEDGSYFLYSKLSVDKSRWQRGDTFICAVMHEALHNHYTQESLSHSPGK

SEQ ID NO: 175 - protein, 220 aa, Artificial Sequence
  Synthetic: Exemplary variant canine IgG-B Fc  Protein A + C1q + CD16 -  A(98)G
PAPEMLGGPSVFIFPPKPKDTLLIARTPEVTCVVVDLDPEDPEVQISWFVDGKQMQTAKTQPREEQFNGTYRVVSVLPIGHQDWLKGKQFTCKVNNKGLPSPIERTISKARGQAHQPSVYVLPPSREELSKNTVSLTCLIKDFFPPDIDVEWQSNGQQEPESKYRTTPPQLDEDGSYFLYSKLSVDKSRWQRGDTFICAVMHEALHNHYTQESLSHSPGK

SEQ ID NO: 176 - protein, 220 aa, Artificial Sequence
  Synthetic: Exemplary variant canine IgG-B Fc  Protein A + C1q + CD16 - D(38)G  K(97)I A(98)G
PAPEMLGGPSVFIFPPKPKDTLLIARTPEVTCVVVDLGPEDPEVQISWFVDGKQMQTAKTQPREEQFNGTYRVVSVLPIGHQDWLKGKQFTCKVNNIGLPSPIERTISKARGQAHQPSVYVLPPSREELSKNTVSLTCLIKDFFPPDIDVEWQSNGQQEPESKYRTTPPQLDEDGSYFLYSKLSVDKSRWQRGDTFICAVMHEALHNHYTQESLSHSPGK

SEQ ID NO: 177 - protein, 220 aa, Artificial Sequence
  Synthetic: Exemplary variant canine IgG-B Fc  Protein A + C1q - CD16 - D(38)G  K(93)R K(97)I A(98)G
PAPEMLGGPSVFIFPPKPKDTLLIARTPEVTCVVVDLGPEDPEVQISWFVDGKQMQTAKTQPREEQFNGTYRVVSVLPIGHQDWLKGKQFTCRVNNIGLPSPIERTISKARGQAHQPSVYVLPPSREELSKNTVSLTCLIKDFFPPDIDVEWQSNGQQEPESKYRTTPPQLDEDGSYFLYSKLSVDKSRWQRGDTFICAVMHEALHNHYTQESLSHSPGK

SEQ ID NO: 178 - protein, 220 aa, Artificial Sequence
  Synthetic: Exemplary variant canine IgG-B Fc  Protein A + C1q + CD16 -  M(5)P P(39)R
PAPEPLGGPSVFIFPPKPKDTLLIARTPEVTCVVVDLDREDPEVQISWFVDGKQMQTAKTQPREEQFNGTYRVVSVLPIGHQDWLKGKQFTCKVNNKALPSPIERTISKARGQAHQPSVYVLPPSREELSKNTVSLTCLIKDFFPPDIDVEWQSNGQQEPESKYRTTPPQLDEDGSYFLYSKLSVDKSRWQRGDTFICAVMHEALHNHYTQESLSHSPGK

SEQ ID NO: 179 - protein, 220 aa, Artificial Sequence
  Synthetic: Exemplary variant canine IgG-B Fc  Protein A + C1q - CD16 - M(5)P P(39)R K(93)R
PAPEPLGGPSVFIFPPKPKDTLLIARTPEVTCVVVDLDREDPEVQISWFVDGKQMQTAKTQPREEQFNGTYRVVSVLPIGHQDWLKGKQFTCRVNNKALPSPIERTISKARGQAHQPSVYVLPPSREELSKNTVSLTCLIKDFFPPDIDVEWQSNGQQEPESKYRTTPPQLDEDGSYFLYSKLSVDKSRWQRGDTFICAVMHEALHNHYTQESLSHSPGK

SEQ ID NO: 180 - protein, 220 aa, Artificial Sequence
  Synthetic: Exemplary variant canine IgG-C Fc   C1q + Protein A + I(21)T V(23)L T(24)I
PGCGLLGGPSVFIFPPKPKDTLLIARTPTVTCVVVDLDPENPEVQISWFVDSKQVQTANTQPREEQSNGTYRVVSVLPIGHQDWLSGKQFKCKVNNKALPSPIEEIISKTPGQAHQPNVYVLPPSRDEMSKNTVTLTCLVKDFFPPEIDVEWQSNGQQEPESKYRMTPPQLDEDGSYFLYSKLSVDKSRWQRGDTFICAVMHEALHNHYTQISLSHSPGK

SEQ ID NO: 181 - protein, 220 aa, Artificial Sequence
  Synthetic: Exemplary variant canine IgG-C Fc   C1q + Protein A + I(21)T
PGCGLLGGPSVFIFPPKPKDTLVTARTPTVTCVVVDLDPENPEVQISWFVDSKQVQTANTQPREEQSNGTYRVVSVLPIGHQDWLSGKQFKCKVNNKALPSPIEEIISKTPGQAHQPNVYVLPPSRDEMSKNTVTLTCLVKDFFPPEIDVEWQSNGQQEPESKYRMTPPQLDEDGSYFLYSKLSVDKSRWQRGDTFICAVMHEALHNHYTQISLSHSPGK

SEQ ID NO: 182 - protein, 220 aa, Artificial Sequence
  Synthetic: Exemplary variant canine IgG-C Fc  Protein A - C1q - K(93)R
PGCGLLGGPSVFIFPPKPKDILVTARTPTVTCVVVDLDPENPEVQISWFVDSKQVQTANTQPREEQSNGTYRVVSVLPIGHQDWLSGKQFKCRVNNKALPSPIEEIISKTPGQAHQPNVYVLPPSRDEMSKNTVTLTCLVKDFFPPEIDVEWQSNGQQEPESKYRMTPPQLDEDGSYFLYSKLSVDKSRWQRGDTFICAVMHEALHNHYTQISLSHSPGK

SEQ ID NO: 183 - protein, 220 aa, Artificial Sequence
  Synthetic: Exemplary variant canine IgG-C Fc   C1q -   K(93)R Protein A + I(21)T V(23)L T(24)I
PGCGLLGGPSVFIFPPKPKDTLLIARTPTVTCVVVDLDPENPEVQISWFVDSKQVQTANTQPREEQSNGTYRVVSVLPIGHQDWLSGKQFKCRVNNKALPSPIEEIISKTPGQAHQPNVYVLPPSRDEMSKNTVTLTCLVKDFFPPEIDVEWQSNGQQEPESKYRMTPPQLDEDGSYFLYSKLSVDKSRWQRGDTFICAVMHEALHNHYTQISLSHSPGK

SEQ ID NO: 184 - protein, 220 aa, Artificial Sequence
  Synthetic: Exemplary variant canine IgG-C Fc  Protein A + C1q + CD16 -  L(5)P
PGCGPLGGPSVFIFPPKPKDILVTARTPTVTCVVVDLDPENPEVQISWFVDSKQVQTANTQPREEQSNGTYRVVSVLPIGHQDWLSGKQFKCKVNNKALPSPIEEIISKTPGQAHQPNVYVLPPSRDEMSKNTVTLTCLVKDFFPPEIDVEWQSNGQQEPESKYRMTPPQLDEDGSYFLYSKLSVDKSRWQRGDTFICAVMHEALHNHYTQISLSHSPGK

SEQ ID NO: 185 - protein, 220 aa, Artificial Sequence
  Synthetic: Exemplary variant canine IgG-C Fc  Protein A + C1q + CD16 -  P(39)R
PGCGLLGGPSVFIFPPKPKDILVTARTPTVTCVVVDLDRENPEVQISWFVDSKQVQTANTQPREEQSNGTYRVVSVLPIGHQDWLSGKQFKCKVNNKALPSPIEEIISKTPGQAHQPNVYVLPPSRDEMSKNTVTLTCLVKDFFPPEIDVEWQSNGQQEPESKYRMTPPQLDEDGSYFLYSKLSVDKSRWQRGDTFICAVMHEALHNHYTQISLSHSPGK

SEQ ID NO: 186 - protein, 220 aa, Artificial Sequence
  Synthetic: Exemplary variant canine IgG-C Fc  Protein A + C1q + CD16 -  D(38)G
PGCGLLGGPSVFIFPPKPKDILVTARTPTVTCVVVDLGPENPEVQISWFVDSKQVQTANTQPREEQSNGTYRVVSVLPIGHQDWLSGKQFKCKVNNKALPSPIEEIISKTPGQAHQPNVYVLPPSRDEMSKNTVTLTCLVKDFFPPEIDVEWQSNGQQEPESKYRMTPPQLDEDGSYFLYSKLSVDKSRWQRGDTFICAVMHEALHNHYTQISLSHSPGK

SEQ ID NO: 187 - protein, 220 aa, Artificial Sequence
  Synthetic: Exemplary variant canine IgG-C Fc  Protein A + C1q + CD16 -  K(97)I
PGCGLLGGPSVFIFPPKPKDILVTARTPTVTCVVVDLDPENPEVQISWFVDSKQVQTANTQPREEQSNGTYRVVSVLPIGHQDWLSGKQFKCKVNNIALPSPIEEIISKTPGQAHQPNVYVLPPSRDEMSKNTVTLTCLVKDFFPPEIDVEWQSNGQQEPESKYRMTPPQLDEDGSYFLYSKLSVDKSRWQRGDTFICAVMHEALHNHYTQISLSHSPGK

SEQ ID NO: 188 - protein, 220 aa, Artificial Sequence
  Synthetic: Exemplary variant canine IgG-C Fc  Protein A + C1q + CD16 -  A(98)G
PGCGLLGGPSVFIFPPKPKDILVTARTPTVTCVVVDLDPENPEVQISWFVDSKQVQTANTQPREEQSNGTYRVVSVLPIGHQDWLSGKQFKCKVNNKGLPSPIEEIISKTPGQAHQPNVYVLPPSRDEMSKNTVTLTCLVKDFFPPEIDVEWQSNGQQEPESKYRMTPPQLDEDGSYFLYSKLSVDKSRWQRGDTFICAVMHEALHNHYTQISLSHSPGK

SEQ ID NO: 189 - protein, 220 aa, Artificial Sequence
  Synthetic: Exemplary variant canine IgG-C Fc  Protein A + C1q + CD16 - D(38)G  K(97)I A(98)G
PGCGLLGGPSVFIFPPKPKDILVTARTPTVTCVVVDLGPENPEVQISWFVDSKQVQTANTQPREEQSNGTYRVVSVLPIGHQDWLSGKQFKCKVNNIGLPSPIEEIISKTPGQAHQPNVYVLPPSRDEMSKNTVTLTCLVKDFFPPEIDVEWQSNGQQEPESKYRMTPPQLDEDGSYFLYSKLSVDKSRWQRGDTFICAVMHEALHNHYTQISLSHSPGK

SEQ ID NO: 190 - protein, 220 aa, Artificial Sequence
  Synthetic: Exemplary variant canine IgG-C Fc  Protein A + C1q - CD16 - D(38)G  K(93)R K(97)I A(98)G
PGCGLLGGPSVFIFPPKPKDILVTARTPTVTCVVVDLGPENPEVQISWFVDSKQVQTANTQPREEQSNGTYRVVSVLPIGHQDWLSGKQFKCRVNNIGLPSPIEEIISKTPGQAHQPNVYVLPPSRDEMSKNTVTLTCLVKDFFPPEIDVEWQSNGQQEPESKYRMTPPQLDEDGSYFLYSKLSVDKSRWQRGDTFICAVMHEALHNHYTQISLSHSPGK

SEQ ID NO: 191 - protein, 220 aa, Artificial Sequence
  Synthetic: Exemplary variant canine IgG-C Fc  Protein A + C1q + CD16 -  L(5)P P(39)R
PGCGPLGGPSVFIFPPKPKDILVTARTPTVTCVVVDLDRENPEVQISWFVDSKQVQTANTQPREEQSNGTYRVVSVLPIGHQDWLSGKQFKCKVNNKALPSPIEEIISKTPGQAHQPNVYVLPPSRDEMSKNTVTLTCLVKDFFPPEIDVEWQSNGQQEPESKYRMTPPQLDEDGSYFLYSKLSVDKSRWQRGDTFICAVMHEALHNHYTQISLSHSPGK

SEQ ID NO: 192 - protein, 220 aa, Artificial Sequence
  Synthetic: Exemplary variant canine IgG-C Fc  Protein A + C1q - CD16 - M(5)P P(39)R K(93)R
PGCGPLGGPSVFIFPPKPKDILVTARTPTVTCVVVDLDRENPEVQISWFVDSKQVQTANTQPREEQSNGTYRVVSVLPIGHQDWLSGKQFKCRVNNKALPSPIEEIISKTPGQAHQPNVYVLPPSRDEMSKNTVTLTCLVKDFFPPEIDVEWQSNGQQEPESKYRMTPPQLDEDGSYFLYSKLSVDKSRWQRGDTFICAVMHEALHNHYTQISLSHSPGK

SEQ ID NO: 193 - protein, 221 aa, Artificial Sequence
  Synthetic: Exemplary variant canine IgG-D Fc   C1q - Protein A + I(21)T R(23)L T(25)A E(80)G Q(207)H
PVPESLGGPSVFIFPPKPKDTLLIARTPEITCVVLDLGREDPEVQISWFVDGKEVHTAKTQPREQQFNSTYRVVSVLPIGHQDWLTGKEFKCRVNHIGLPSPIERTISKARGQAHQPSVYVLPPSPKELSSSDTVTLTCLIKDFFPPEIDVEWQSNGQPEPESKYHTTAPQLDEDGSYFLYSKLSVDKSRWQQGDTFTCAVMHEALHNHYTDLSLSHSPGK

SEQ ID NO: 194 - protein, 221 aa, Artificial Sequence
  Synthetic: Exemplary variant canine IgG-D Fc   C1q - Protein A + I(21)T Q(207)H
PVPESLGGPSVFIFPPKPKDTLRITRTPEITCVVLDLGREDPEVQISWFVDGKEVHTAKTQPREQQFNSTYRVVSVLPIEHQDWLTGKEFKCRVNHIGLPSPIERTISKARGQAHQPSVYVLPPSPKELSSSDTVTLTCLIKDFFPPEIDVEWQSNGQPEPESKYHTTAPQLDEDGSYFLYSKLSVDKSRWQQGDTFTCAVMHEALHNHYTDLSLSHSPGK

SEQ ID NO: 195 - protein, 221 aa, Artificial Sequence
  Synthetic: Exemplary variant canine IgG-A Fc   Bispecific knob T(138)W
PVPEPLGGPSVLIFPPKPKDILRITRTPEVTCVVLDLGREDPEVQISWFVDGKEVHTAKTQSREQQFNGTYRVVSVLPIEHQDWLTGKEFKCRVNHIDLPSPIERTISKARGRAHKPSVYVLPPSPKELSSSDTVSIWCLIKDFYPPDIDVEWQSNGQQEPERKHRMTPPQLDEDGSYFLYSKLSVDKSRWQQGDPFTCAVMHETLQNHYTDLSLSHSPGK

SEQ ID NO: 196 - protein, 220 aa, Artificial Sequence
  Synthetic: Exemplary variant canine IgG-B Fc  Bispecific knob T(137)W
PAPEMLGGPSVFIFPPKPKDTLLIARTPEVTCVVVDLDPEDPEVQISWFVDGKQMQTAKTQPREEQFNGTYRVVSVLPIGHQDWLKGKQFTCKVNNKALPSPIERTISKARGQAHQPSVYVLPPSREELSKNTVSLWCLIKDFFPPDIDVEWQSNGQQEPESKYRTTPPQLDEDGSYFLYSKLSVDKSRWQRGDTFICAVMHEALHNHYTQESLSHSPGK

SEQ ID NO: 197 - protein, 220 aa, Artificial Sequence
  Synthetic: Exemplary variant canine IgG-C Fc   Bispecific knob T(137)W
PGCGLLGGPSVFIFPPKPKDILVTARTPTVTCVVVDLDPENPEVQISWFVDSKQVQTANTQPREEQSNGTYRVVSVLPIGHQDWLSGKQFKCKVNNKALPSPIEEIISKTPGQAHQPNVYVLPPSRDEMSKNTVTLWCLVKDFFPPEIDVEWQSNGQQEPESKYRMTPPQLDEDGSYFLYSKLSVDKSRWQRGDTFICAVMHEALHNHYTQISLSHSPGK

SEQ ID NO: 198 - protein, 221 aa, Artificial Sequence
  Synthetic: Exemplary variant canine IgG-D Fc  Bispecific knob T(138)W
PVPESLGGPSVFIFPPKPKDILRITRTPEITCVVLDLGREDPEVQISWFVDGKEVHTAKTQPREQQFNSTYRVVSVLPIEHQDWLTGKEFKCRVNHIGLPSPIERTISKARGQAHQPSVYVLPPSPKELSSSDTVTLWCLIKDFFPPEIDVEWQSNGQPEPESKYHTTAPQLDEDGSYFLYSKLSVDKSRWQQGDTFTCAVMHEALQNHYTDLSLSHSPGK

SEQ ID NO: 199 - protein, 221 aa, Artificial Sequence
  Synthetic: Exemplary variant canine IgG-A Fc   Bispecific hole T(138)S L(140)A
PVPEPLGGPSVLIFPPKPKDILRITRTPEVTCVVLDLGREDPEVQISWFVDGKEVHTAKTQSREQQFNGTYRVVSVLPIEHQDWLTGKEFKCRVNHIDLPSPIERTISKARGRAHKPSVYVLPPSPKELSSSDTVSISCAIKDFYPPDIDVEWQSNGQQEPERKHRMTPPQLDEDGSYFLYSKLSVDKSRWQQGDPFTCAVMHETLQNHYTDLSLSHSPGK

SEQ ID NO: 200 - protein, 220 aa, Artificial Sequence
  Synthetic: Exemplary variant canine IgG-B Fc  Bispecific hole T(137)S L(139)A
PAPEMLGGPSVFIFPPKPKDTLLIARTPEVTCVVVDLDPEDPEVQISWFVDGKQMQTAKTQPREEQFNGTYRVVSVLPIGHQDWLKGKQFTCKVNNKALPSPIERTISKARGQAHQPSVYVLPPSREELSKNTVSLSCAIKDFFPPDIDVEWQSNGQQEPESKYRTTPPQLDEDGSYFLYSKLSVDKSRWQRGDTFICAVMHEALHNHYTQESLSHSPGK

SEQ ID NO: 201 - protein, 220 aa, Artificial Sequence
  Synthetic: Exemplary variant canine IgG-C Fc  Bispecific hole T(137)S L(139)A
PGCGLLGGPSVFIFPPKPKDILVTARTPTVTCVVVDLDPENPEVQISWFVDSKQVQTANTQPREEQSNGTYRVVSVLPIGHQDWLSGKQFKCKVNNKALPSPIEEIISKTPGQAHQPNVYVLPPSRDEMSKNTVTLSCAVKDFFPPEIDVEWQSNGQQEPESKYRMTPPQLDEDGSYFLYSKLSVDKSRWQRGDTFICAVMHEALHNHYTQISLSHSPGK

SEQ ID NO: 202 - protein, 221 aa, Artificial Sequence
  Synthetic: Exemplary variant canine IgG-D Fc  Bispecific hole T(138)S L(140)A
PVPESLGGPSVFIFPPKPKDILRITRTPEITCVVLDLGREDPEVQISWFVDGKEVHTAKTQPREQQFNSTYRVVSVLPIEHQDWLTGKEFKCRVNHIGLPSPIERTISKARGQAHQPSVYVLPPSPKELSSSDTVTLSCAIKDFFPPEIDVEWQSNGQPEPESKYHTTAPQLDEDGSYFLYSKLSVDKSRWQQGDTFTCAVMHEALQNHYTDLSLSHSPGK

SEQ ID NO: 203 - protein, 237 aa, Artificial Sequence
  Synthetic: Exemplary wild-type feline IgG1a Fc  Protein A + C1q +
RKTDHPPGPKPCDCPKCPPPEMLGGPSIFIFPPKPKDTLSISRTPEVTCLVVDLGPDDSDVQITWFVDNTQVYTAKTSPREEQFNSTYRVVSVLPILHQDWLKGKEFKCKVNSKSLPSPIERTISKAKGQPHEPQVYVLPPAQEELSENKVSVTCLIKSFHPPDIAVEWEITGQPEPENNYRTTPPQLDSDGTYFVYSKLSVDRSHWQRGNTYTCSVSHEALHSHHTQKSLTQSPGK

SEQ ID NO: 204 - protein, 237 aa, Artificial Sequence
  Synthetic: Exemplary wild-type feline IgG1a Fc  Protein A + C1q +
RKTDHPPGPKTGEGPKCPPPEMLGGPSIFIFPPKPKDTLSISRTPEVTCLVVDLGPDDSDVQITWFVDNTQVYTAKTSPREEQFNSTYRVVSVLPILHQDWLKGKEFKCKVNSKSLPSPIERTISKAKGQPHEPQVYVLPPAQEELSENKVSVTCLIKSFHPPDIAVEWEITGQPEPENNYRTTPPQLDSDGTYFVYSKLSVDRSHWQRGNTYTCSVSHEALHSHHTQKSLTQSPGK

SEQ ID NO: 205 - protein, 237 aa, Artificial Sequence
  Synthetic: Exemplary wild-type feline IgG1b Fc  Protein A + C1q +
RKTDHPPGPKPCDCPKCPPPEMLGGPSIFIFPPKPKDTLSISRTPEVTCLVVDLGPDDSDVQITWFVDNTQVYTAKTSPREEQFNSTYRVVSVLPILHQDWLKGKEFKCKVNSKSLPSPIERTISKDKGQPHEPQVYVLPPAQEELSENKVSVTCLIEGFYPSDIAVEWEITGQPEPENNYRTTPPQLDSDGTYFLYSRLSVDRSRWQRGNTYTCSVSHEALHSHHTQKSLTQSPGK

SEQ ID NO: 206 - protein, 237 aa, Artificial Sequence
  Synthetic: Exemplary wild-type feline IgG1b Fc  Protein A + C1q +
RKTDHPPGPKTGEGPKCPPPEMLGGPSIFIFPPKPKDTLSISRTPEVTCLVVDLGPDDSDVQITWFVDNTQVYTAKTSPREEQFNSTYRVVSVLPILHQDWLKGKEFKCKVNSKSLPSPIERTISKDKGQPHEPQVYVLPPAQEELSENKVSVTCLIEGFYPSDIAVEWEITGQPEPENNYRTTPPQLDSDGTYFLYSRLSVDRSRWQRGNTYTCSVSHEALHSHHTQKSLTQSPGK

SEQ ID NO: 207 - protein, 237 aa, Artificial Sequence
  Synthetic: Exemplary wild-type feline IgG2 Fc  Protein A + C1q -
PKTASTIESKTGEGPKCPVPEIPGAPSVFIFPPKPKDTLSISRTPEVTCLVVDLGPDDSNVQITWFVDNTEMHTAKTRPREEQFNSTYRVVSVLPILHQDWLKGKEFKCKVNSKSLPSAMERTISKAKGQPHEPQVYVLPPTQEELSENKVSVTCLIKGFHPPDIAVEWEITGQPEPENNYQTTPPQLDSDGTYFLYSRLSVDRSHWQRGNTYTCSVSHEALHSHHTQKSLTQSPGK

SEQ ID NO: 208 - protein, 237 aa, Artificial Sequence
  Synthetic: Exemplary variant feline IgG1a Fc with modified hinge K(16)P
RKTDHPPGPKPCDCPPCPPPEMLGGPSIFIFPPKPKDTLSISRTPEVTCLVVDLGPDDSDVQITWFVDNTQVYTAKTSPREEQFNSTYRVVSVLPILHQDWLKGKEFKCKVNSKSLPSPIERTISKAKGQPHEPQVYVLPPAQEELSENKVSVTCLIKSFHPPDIAVEWEITGQPEPENNYRTTPPQLDSDGTYFVYSKLSVDRSHWQRGNTYTCSVSHEALHSHHTQKSLTQSPGK

SEQ ID NO: 209 - protein, 237 aa, Artificial Sequence; identical to SEQ ID NO: 203
  Synthetic: Exemplary variant feline IgG1a Fc  Protein A + C1q - P(198)A

SEQ ID NO: 210 - protein, 237 aa, Artificial Sequence; identical to SEQ ID NO: 204
  Synthetic: Exemplary variant feline IgG1a Fc  Protein A + C1q - P(198)A

SEQ ID NO: 211 - protein, 237 aa, Artificial Sequence
  Synthetic: Exemplary variant feline IgG1b Fc with modified hinge K(16)P
RKTDHPPGPKPCDCPPCPPPEMLGGPSIFIFPPKPKDTLSISRTPEVTCLVVDLGPDDSDVQITWFVDNTQVYTAKTSPREEQFNSTYRVVSVLPILHQDWLKGKEFKCKVNSKSLPSPIERTISKDKGQPHEPQVYVLPPAQEELSENKVSVTCLIEGFYPSDIAVEWEITGQPEPENNYRTTPPQLDSDGTYFLYSRLSVDRSRWQRGNTYTCSVSHEALHSHHTQKSLTQSPGK

SEQ ID NO: 212 - protein, 237 aa, Artificial Sequence; identical to SEQ ID NO: 205
  Synthetic: Exemplary variant feline IgG1b Fc  Protein A + C1q - P(198)A

SEQ ID NO: 213 - protein, 237 aa, Artificial Sequence; identical to SEQ ID NO: 206
  Synthetic: Exemplary variant feline IgG1b Fc  Protein A + C1q - P(198)A

SEQ ID NO: 214 - protein, 237 aa, Artificial Sequence
  Synthetic: Exemplary variant feline IgG2 Fc with modified hinge Hinge Cys G(14)C
PKTASTIESKTGECPKCPVPEIPGAPSVFIFPPKPKDTLSISRTPEVTCLVVDLGPDDSNVQITWFVDNTEMHTAKTRPREEQFNSTYRVVSVLPILHQDWLKGKEFKCKVNSKSLPSAMERTISKAKGQPHEPQVYVLPPTQEELSENKVSVTCLIKGFHPPDIAVEWEITGQPEPENNYQTTPPQLDSDGTYFLYSRLSVDRSHWQRGNTYTCSVSHEALHSHHTQKSLTQSPGK

SEQ ID NO: 215 - protein, 237 aa, Artificial Sequence
  Synthetic: Exemplary variant feline IgG2 Fc with modified hinge K(16)P
PKTASTIESKTGEGPPCPVPEIPGAPSVFIFPPKPKDTLSISRTPEVTCLVVDLGPDDSNVQITWFVDNTEMHTAKTRPREEQFNSTYRVVSVLPILHQDWLKGKEFKCKVNSKSLPSAMERTISKAKGQPHEPQVYVLPPTQEELSENKVSVTCLIKGFHPPDIAVEWEITGQPEPENNYQTTPPQLDSDGTYFLYSRLSVDRSHWQRGNTYTCSVSHEALHSHHTQKSLTQSPGK

SEQ ID NO: 216 - protein, 237 aa, Artificial Sequence
  Synthetic: Exemplary variant feline IgG2 Fc with feline IgG1 hinge
RKTDHPPGPKPCDCPKCPPPEMLGGPSVFIFPPKPKDTLSISRTPEVTCLVVDLGPDDSNVQITWFVDNTEMHTAKTRPREEQFNSTYRVVSVLPILHQDWLKGKEFKCKVNSKSLPSAMERTISKAKGQPHEPQVYVLPPTQEELSENKVSVTCLIKGFHPPDIAVEWEITGQPEPENNYQTTPPQLDSDGTYFLYSRLSVDRSHWQRGNTYTCSVSHEALHSHHTQKSLTQSPGK

SEQ ID NO: 217 - protein, 237 aa, Artificial Sequence
  Synthetic: Exemplary variant feline IgG1a Fc  Bispecific knob T(154)W
RKTDHPPGPKPCDCPKCPPPEMLGGPSIFIFPPKPKDTLSISRTPEVTCLVVDLGPDDSDVQITWFVDNTQVYTAKTSPREEQFNSTYRVVSVLPILHQDWLKGKEFKCKVNSKSLPSPIERTISKAKGQPHEPQVYVLPPAQEELSENKVSVWCLIKSFHPPDIAVEWEITGQPEPENNYRTTPPQLDSDGTYFVYSKLSVDRSHWQRGNTYTCSVSHEALHSHHTQKSLTQSPGK

SEQ ID NO: 218 - protein, 237 aa, Artificial Sequence
  Synthetic: Exemplary variant feline IgG1a Fc  Bispecific knob T(154)W
RKTDHPPGPKTGEGPKCPPPEMLGGPSIFIFPPKPKDTLSISRTPEVTCLVVDLGPDDSDVQITWFVDNTQVYTAKTSPREEQFNSTYRVVSVLPILHQDWLKGKEFKCKVNSKSLPSPIERTISKAKGQPHEPQVYVLPPAQEELSENKVSVWCLIKSFHPPDIAVEWEITGQPEPENNYRTTPPQLDSDGTYFVYSKLSVDRSHWQRGNTYTCSVSHEALHSHHTQKSLTQSPGK

SEQ ID NO: 219 - protein, 237 aa, Artificial Sequence
  Synthetic: Exemplary variant feline IgG1b Fc  Bispecific knob T(154)W
RKTDHPPGPKPCDCPKCPPPEMLGGPSIFIFPPKPKDTLSISRTPEVTCLVVDLGPDDSDVQITWFVDNTQVYTAKTSPREEQFNSTYRVVSVLPILHQDWLKGKEFKCKVNSKSLPSPIERTISKDKGQPHEPQVYVLPPAQEELSENKVSVWCLIEGFYPSDIAVEWEITGQPEPENNYRTTPPQLDSDGTYFLYSRLSVDRSRWQRGNTYTCSVSHEALHSHHTQKSLTQSPGK

SEQ ID NO: 220 - protein, 237 aa, Artificial Sequence
  Synthetic: Exemplary variant feline IgG1b Fc  Bispecific knob T(154)W
RKTDHPPGPKTGEGPKCPPPEMLGGPSIFIFPPKPKDTLSISRTPEVTCLVVDLGPDDSDVQITWFVDNTQVYTAKTSPREEQFNSTYRVVSVLPILHQDWLKGKEFKCKVNSKSLPSPIERTISKDKGQPHEPQVYVLPPAQEELSENKVSVWCLIEGFYPSDIAVEWEITGQPEPENNYRTTPPQLDSDGTYFLYSRLSVDRSRWQRGNTYTCSVSHEALHSHHTQKSLTQSPGK

SEQ ID NO: 221 - protein, 237 aa, Artificial Sequence
  Synthetic: Exemplary variant feline IgG2 Fc  Bispecific knob T(154)W
PKTASTIESKTGEGPKCPVPEIPGAPSVFIFPPKPKDTLSISRTPEVTCLVVDLGPDDSNVQITWFVDNTEMHTAKTRPREEQFNSTYRVVSVLPILHQDWLKGKEFKCKVNSKSLPSAMERTISKAKGQPHEPQVYVLPPTQEELSENKVSVWCLIKGFHPPDIAVEWEITGQPEPENNYQTTPPQLDSDGTYFLYSRLSVDRSHWQRGNTYTCSVSHEALHSHHTQKSLTQSPGK

SEQ ID NO: 222 - protein, 237 aa, Artificial Sequence
  Synthetic: Exemplary variant feline IgG1a Fc  Bispecific hole T(154)S, L(156)A
RKTDHPPGPKPCDCPKCPPPEMLGGPSIFIFPPKPKDTLSISRTPEVTCLVVDLGPDDSDVQITWFVDNTQVYTAKTSPREEQFNSTYRVVSVLPILHQDWLKGKEFKCKVNSKSLPSPIERTISKAKGQPHEPQVYVLPPAQEELSENKVSVSCAIKSFHPPDIAVEWEITGQPEPENNYRTTPPQLDSDGTYFVYSKLSVDRSHWQRGNTYTCSVSHEALHSHHTQKSLTQSPGK

SEQ ID NO: 223 - protein, 237 aa, Artificial Sequence
  Synthetic: Exemplary variant feline IgG1a Fc  Bispecific hole T(154)S, L(156)A
RKTDHPPGPKTGEGPKCPPPEMLGGPSIFIFPPKPKDTLSISRTPEVTCLVVDLGPDDSDVQITWFVDNTQVYTAKTSPREEQFNSTYRVVSVLPILHQDWLKGKEFKCKVNSKSLPSPIERTISKAKGQPHEPQVYVLPPAQEELSENKVSVSCAIKSFHPPDIAVEWEITGQPEPENNYRTTPPQLDSDGTYFVYSKLSVDRSHWQRGNTYTCSVSHEALHSHHTQKSLTQSPGK

SEQ ID NO: 224 - protein, 237 aa, Artificial Sequence
  Synthetic: Exemplary variant feline IgG1b Fc  Bispecific hole T(154)S, L(156)A
RKTDHPPGPKPCDCPKCPPPEMLGGPSIFIFPPKPKDTLSISRTPEVTCLVVDLGPDDSDVQITWFVDNTQVYTAKTSPREEQFNSTYRVVSVLPILHQDWLKGKEFKCKVNSKSLPSPIERTISKDKGQPHEPQVYVLPPAQEELSENKVSVSCAIEGFYPSDIAVEWEITGQPEPENNYRTTPPQLDSDGTYFLYSRLSVDRSRWQRGNTYTCSVSHEALHSHHTQKSLTQSPGK

SEQ ID NO: 225 - protein, 237 aa, Artificial Sequence
  Synthetic: Exemplary variant feline IgG1b Fc  Bispecific hole T(154)S, L(156)A
RKTDHPPGPKTGEGPKCPPPEMLGGPSIFIFPPKPKDTLSISRTPEVTCLVVDLGPDDSDVQITWFVDNTQVYTAKTSPREEQFNSTYRVVSVLPILHQDWLKGKEFKCKVNSKSLPSPIERTISKDKGQPHEPQVYVLPPAQEELSENKVSVSCAIEGFYPSDIAVEWEITGQPEPENNYRTTPPQLDSDGTYFLYSRLSVDRSRWQRGNTYTCSVSHEALHSHHTQKSLTQSPGK

SEQ ID NO: 226 - protein, 237 aa, Artificial Sequence
  Synthetic: Exemplary variant feline IgG2 Fc  Bispecific hole T(154)S, L(156)A
PKTASTIESKTGEGPKCPVPEIPGAPSVFIFPPKPKDTLSISRTPEVTCLVVDLGPDDSNVQITWFVDNTEMHTAKTRPREEQFNSTYRVVSVLPILHQDWLKGKEFKCKVNSKSLPSAMERTISKAKGQPHEPQVYVLPPTQEELSENKVSVSCAIKGFHPPDIAVEWEITGQPEPENNYQTTPPQLDSDGTYFLYSRLSVDRSHWQRGNTYTCSVSHEALHSHHTQKSLTQSPGK

SEQ ID NO: 227 - protein, 98 aa, Canis lupus familiaris
  misc_feature (1)..(98): Wild-type canine IgG-A CH1
ASTTAPSVFPLAPSCGSTSGSTVALACLVSGYFPEPVTVSWNSGSLTSGVHTFPSVLQSSGLHSLSSMVTVPSSRWPSETFTCNVVHPASNTKVDKPV

SEQ ID NO: 228 - protein, 98 aa, Canis lupus familiaris
  misc_feature (1)..(98): Wild-type canine IgG-B CH1
ASTTAPSVFPLAPSCGSTSGSTVALACLVSGYFPEPVTVSWNSGSLTSGVHTFPSVLQSSGLYSLSSMVTVPSSRWPSETFTCNVAHPASKTKVDKPV

SEQ ID NO: 229 - protein, 98 aa, Canis lupus familiaris
  misc_feature (1)..(98): Wild-type canine IgG-C CH1
ASTTAPSVFPLAPSCGSQSGSTVALACLVSGYIPEPVTVSWNSVSLTSGVHTFPSVLQSSGLYSLSSMVTVPSSRWPSETFTCNVAHPATNTKVDKPV

SEQ ID NO: 230 - protein, 98 aa, Canis lupus familiaris
  misc_feature (1)..(98): Wild-type canine IgG-D CH1
ASTTAPSVFPLAPSCGSTSGSTVALACLVSGYFPEPVTVSWNSGSLTSGVHTFPSVLQSSGLYSLSSTVTVPSSRWPSETFTCNVVHPASNTKVDKPV

SEQ ID NO: 231 - protein, 98 aa, Artificial Sequence
  Synthetic: Variant canine IgG-A CH1  A(24)L S(30)D
ASTTAPSVFPLAPSCGSTSGSTVLLACLVDGYFPEPVTVSWNSGSLTSGVHTFPSVLQSSGLHSLSSMVTVPSSRWPSETFTCNVVHPASNTKVDKPV

SEQ ID NO: 232 - protein, 98 aa, Artificial Sequence
  Synthetic: Variant canine IgG-B CH1  A(24)L S(30)D
ASTTAPSVFPLAPSCGSTSGSTVLLACLVDGYFPEPVTVSWNSGSLTSGVHTFPSVLQSSGLYSLSSMVTVPSSRWPSETFTCNVAHPASKTKVDKPV

SEQ ID NO: 233 - protein, 98 aa, Artificial Sequence
  Synthetic: Variant canine IgG-C CH1  A(24)L S(30)D
ASTTAPSVFPLAPSCGSQSGSTVLLACLVDGYIPEPVTVSWNSVSLTSGVHTFPSVLQSSGLYSLSSMVTVPSSRWPSETFTCNVAHPATNTKVDKPV

SEQ ID NO: 234 - protein, 98 aa, Artificial Sequence
  Synthetic: Variant canine IgG-D CH1  A(24)L S(30)D
ASTTAPSVFPLAPSCGSTSGSTVLLACLVDGYFPEPVTVSWNSGSLTSGVHTFPSVLQSSGLYSLSSTVTVPSSRWPSETFTCNVVHPASNTKVDKPV

SEQ ID NO: 235 - protein, 110 aa, Canis lupus familiaris
  misc_feature (1)..(110): Wild-type canine kappa constant region
RNDAQPAVYLFQPSPDQLHTGSASVVCLLNSFYPKDINVKWKVDGVIQDTGIQESVTEQDKDSTYSLSSTLTMSSTEYLSHELYSCEITHKSLPSTLIKSFQRSECQRVD

SEQ ID NO: 236 - protein, 110 aa, Artificial Sequence
  Synthetic: Variant canine kappa constant region  F(11)A S(22)R
RNDAQPAVYLAQPSPDQLHTGRASVVCLLNSFYPKDINVKWKVDGVIQDTGIQESVTEQDKDSTYSLSSTLTMSSTEYLSHELYSCEITHKSLPSTLIKSFQRSECQRVD

SEQ ID NO: 237 - protein, 98 aa, Felis catus
  misc_feature (1)..(98): Wild-type feline IgG1 CH1
ASTTAPSVFPLAPSCGTTSGATVALACLVSGYFPEPVTVSWNSGALTSGVHTFPAVLQASGLYSLSSMVTVPSSRWLSDTFTCNVAHPPSNTKVDKTV

SEQ ID NO: 238 - protein, 98 aa, Felis catus
  misc_feature (1)..(98): Wild-type feline IgG2 CH1
ASTTASSVFPLAPSCGTTSGATVALACLSLGYFPEPVTVSWNSGALTSGVHTFPSVLQASGLYSLSSMVTVPSSRWLSDTFTCNVAHRPSSTKVDKTV

SEQ ID NO: 239 - protein, 98 aa, Artificial Sequence
  Synthetic: Variant feline IgG1 CH1  A(24)L S(30)D
ASTTAPSVFPLAPSCGTTSGATVLLACLVDGYFPEPVTVSWNSGALTSGVHTFPAVLQASGLYSLSSMVTVPSSRWLSDTFTCNVAHPPSNTKVDKTV

SEQ ID NO: 240 - protein, 98 aa, Artificial Sequence
  Synthetic: Variant feline IgG2 CH1  A(24)L S(29)D
ASTTASSVFPLAPSCGTTSGATVLLACLDLGYFPEPVTVSWNSGALTSGVHTFPSVLQASGLYSLSSMVTVPSSRWLSDTFTCNVAHRPSSTKVDKTV

SEQ ID NO: 241 - protein, 110 aa, Felis catus
  misc_feature (1)..(110): Wild-type feline kappa constant region
RSDAQPSVFLFQPSLDELHTGSASIVCILNDFYPKEVNVKWKVDGVVQNKGIQESTTEQNSKDSTYSLSSTLTMSSTEYQSHEKFSCEVTHKSLASTLVKSFNRSECQRE

SEQ ID NO: 242 - protein, 110 aa, Artificial Sequence
  Synthetic: Variant feline kappa constant region  F(11)A S(22)R
RSDAQPSVFLAQPSLDELHTGRASIVCILNDFYPKEVNVKWKVDGVVQNKGIQESTTEQNSKDSTYSLSSTLTMSSTEYQSHEKFSCEVTHKSLASTLVKSFNRSECQRE

SEQ ID NO: 243 - protein, 451 aa, Artificial Sequence
  Synthetic: Caninized Clone I variable HC v2 and variant canine IgG-B Fc  C1q - CD16 - Bispecific Knob  Variant CH1
EVQLVQSGAEVKKPGASVKVSCKASGYTFTSYVMHWVRQAPGQGLEWMGYINPNNDGTFYNGKFQGRVTLTADTSTSTAYMELSSLRAGDIAVYYCAAFYYGFAYWGQGTLVTVSSASTTAPSVFPLAPSCGSTSGSTVLLACLVDGYFPEPVTVSWNSGSLTSGVHTFPSVLQSSGLYSLSSMVTVPSSRWPSETFTCNVAHPASKTKVDKPVPKRENGRVPRPPDCPKCPAPEPLGGPSVFIFPPKPKDTLLIARTPEVTCVVVDLDREDPEVQISWFVDGKQMQTAKTQPREEQFNGTYRVVSVLPIGHQDWLKGKQFTCRVNNKALPSPIERTISKARGQAHQPSVYVLPPSREELSKNTVTLWCLIKDFFPPDIDVEWQSNGQQEPESKYRTTPPQLDEDGSYFLYSKLSVDKSRWQRGDTFICAVMHEALHNHYTQESLSHSPGK

SEQ ID NO: 244 - protein, 217 aa, Artificial Sequence
  Synthetic: Caninized Clone I variable LC v2 and variant canine kappa constant region
DIVMTQTPLSLSVSPGETASISCRASQEISGYLSWLQQKPGGTIKRLIYAASNRDTGVPDRFSGSGSGTDFTLRISRVEADDTGVYYCLQYASYPWTFGGGTKVELKRNDAQPAVYLAQPSPDQLHTGRASVVCLLNSFYPKDINVKWKVDGVIQDTGIQESVTEQDKDSTYSLSSTLTMSSTEYLSHELYSCEITHKSLPSTLIKSFQRSECQRVD

SEQ ID NO: 245 - protein, 453 aa, Artificial Sequence
  Synthetic: Caninized anti-canine IL31 Clone M14 variable HC and variant canine IgG-B Fc  C1q - CD16 - Bispecific Hole
EVQLVESGPSLVKPGGSLRLTCSVTGDSITSGYWNWIRKFPGNKLEYMGYISYSGITDYNPSLKSRITISRDTSKNQYYLQLNSVTTEDTATYYCARYGNYGYAMDYWGQGTLVTVSSASTTAPSVFPLAPSCGSTSGSTVALACLVSGYFPEPVTVSWNSGSLTSGVHTFPSVLQSSGLYSLSSMVTVPSSRWPSETFTCNVAHPASKTKVDKPVPKRENGRVPRPPDCPKCPAPEPLGGPSVFIFPPKPKDTLLIARTPEVTCVVVDLDREDPEVQISWFVDGKQMQTAKTQPREEQFNGTYRVVSVLPIGHQDWLKGKQFTCRVNNKALPSPIERTISKARGQAHQPSVYVLPPSREELSKNTVTLSCAIKDFFPPDIDVEWQSNGQQEPESKYRTTPPQLDEDGSYFLYSKLSVDKSRWQRGDTFICAVMHEALHNHYTQESLSHSPGK

SEQ ID NO: 246 - protein, 221 aa, Artificial Sequence
  Synthetic: Caninized anti-canine IL31 Clone M14 variable LC and canine kappa constant region
DIVMTQSPASLSVSLGQRATISCRASESVDTYGNSFMHWYQQKPGQSPKLLIYRASNLESGIPARFGGSGSGTDFTLTIDPVQADDVATYYCQQSYEDPWTFGGGTKLEIKRNDAQPAVYLFQPSPDQLHTGSASVVCLLNSFYPKDINVKWKVDGVIQDTGIQESVTEQDKDSTYSLSSTLTMSSTEYLSHELYSCEITHKSLPSTLIKSFQRSECQRVD

SEQ ID NO: 247 - protein, 213 aa, Artificial Sequence
  Synthetic: Exemplary wild-type equine IgG1 Fc
GPSVFIFPPNPKDTLMITRTPEVTCVVVDVSQENPDVKFNWYMDGVEVRTATTRPKEEQFNSTYRVVSVLRIQHQDWLSGKEFKCKVNNQALPQPIERTITKTKGRSQEPQVYVLAPHPDELSKSKVSVTCLVKDFYPPEINIEWQSNGQPELETKYSTTQAQQDSDGSYFLYSKLSVDRNRWQQGTTFTCGVMHEALHNHYTQKNVSKNPGK

SEQ ID NO: 248 - protein, 213 aa, Artificial Sequence
  Synthetic: Exemplary wild-type equine IgG2 Fc
GPSVFIFPPNPKDALMISRTPVVTCVVVNLSDQYPDVQFSWYVDNTEVHSAITKQREAQFNSTYRVVSVLPIQHQDWLSGKEFKCSVTNVGVPQPISRAISRGKGPSRVPQVYVLPPHPDELAKSKVSVTCLVKDFYPPDISVEWQSNRWPELEGKYSTTPAQLDGDGSYFLYSKLSLETSRWQQVESFTCAVMHEALHNHFTKTDISESLGK

SEQ ID NO: 249 - protein, 213 aa, Artificial Sequence
  Synthetic: Exemplary wild-type equine IgG3 Fc
GPSVFIFPPKPKDVLMITRMPEVTCLVVDVSHDSSDVLFTWYVDGTEVKTAKTMPNEEQNNSTYRVVSVLRIQHQDWLNGKKFKCKVNNQALPAPVERTISKATGQTRVPQVYVLAPHPDELSKNKVSVTCLVKDFYPPDITVEWQSNEHPEPEGKYRTTEAQKDSDGSYFLYSKLTVEKDRWQQGTTFTCVVMHEALHNHVMQKNISKNPGK

SEQ ID NO: 250 - protein, 213 aa, Artificial Sequence
  Synthetic: Exemplary wild-type equine IgG4 Fc
GPSVFIFPPKPKDVLMISRTPTVTCVVVDVGHDFPDVQFNWYVDGVETHTATTEPKQEQFNSTYRVVSVLPIQHKDWLSGKEFKCKVNNKALPAPVERTISAPTGQPREPQVYVLAPHRDELSKNKVSVTCLVKDFYPPDIDIEWKSNGQPEPETKYSTTPAQLDSDGSYFLYSKLTVETNRWQQGTTFTCAVMHEALHNHYTEKSVSKSPGK

SEQ ID NO: 251 - protein, 213 aa, Artificial Sequence
  Synthetic: Exemplary wild-type equine IgG5 Fc
GPSVFIFPPKPKDVLMISRKPEVTCVVVDLGHDDPDVQFTWFVDGVETHTATTEPKEEQFNSTYRVVSVLPIQHQDWLSGKEFKCSVTSKALPAPVERTISKAKGQLRVPQVYVLAPHPDELAKNTVSVTCLVKDFYPPEIDVEWQSNEHPEPEGKYSTTPAQLNSDGSYFLYSKLSVETSRWKQGESFTCGVMHEAVENHYTQKNVSHSPGK

SEQ ID NO: 252 - protein, 214 aa, Artificial Sequence
  Synthetic: Exemplary wild-type equine IgG6 Fc
GRPSVFIFPPNPKDTLMISRTPEVTCVVVDVSQENPDVKFNWYVDGVEAHTATTKAKEKQDNSTYRVVSVLPIQHQDWRRGKEFKCKVNNRALPAPVERTITKAKGELQDPKVYILAPHREEVTKNTVSVTCLVKDFYPPDINVEWQSNEEPEPEVKYSTTPAQLDGDGSYFLYSKLTVETDRWEQGESFTCVVMHEAIRHTYRQKSITNFPGK

SEQ ID NO: 253 - protein, 213 aa, Artificial Sequence
  Synthetic: Exemplary wild-type equine IgG7 Fc
GPSVFIFPPKPKDVLMISRTPTVTCVVVDVGHDFPDVQFNWYVDGVETHTATTEPKQEQNNSTYRVVSILAIQHKDWLSGKEFKCKVNNQALPAPVQKTISKPTGQPREPQVYVLAPHPDELSKNKVSVTCLVKDFYPPDIDIEWKSNGQPEPETKYSTTPAQLDGDGSYFLYSKLTVETNRWQQGTTFTCAVMHEALHNHYTEKSVSKSPGK

SEQ ID NO: 254 - protein, 213 aa, Artificial Sequence
  Synthetic: Exemplary variant equine IgG1 Fc  Bispecific knob T(130)W
GPSVFIFPPNPKDTLMITRTPEVTCVVVDVSQENPDVKFNWYMDGVEVRTATTRPKEEQFNSTYRVVSVLRIQHQDWLSGKEFKCKVNNQALPQPIERTITKTKGRSQEPQVYVLAPHPDELSKSKVSVWCLVKDFYPPEINIEWQSNGQPELETKYSTTQAQQDSDGSYFLYSKLSVDRNRWQQGTTFTCGVMHEALHNHYTQKNVSKNPGK

SEQ ID NO: 255 - protein, 213 aa, Artificial Sequence
  Synthetic: Exemplary variant equine IgG2 Fc  Bispecific knob T(130)W
GPSVFIFPPNPKDALMISRTPVVTCVVVNLSDQYPDVQFSWYVDNTEVHSAITKQREAQFNSTYRVVSVLPIQHQDWLSGKEFKCSVTNVGVPQPISRAISRGKGPSRVPQVYVLPPHPDELAKSKVSVWCLVKDFYPPDISVEWQSNRWPELEGKYSTTPAQLDGDGSYFLYSKLSLETSRWQQVESFTCAVMHEALHNHFTKTDISESLGK

SEQ ID NO: 256 - protein, 213 aa, Artificial Sequence
  Synthetic: Exemplary variant equine IgG3 Fc  Bispecific knob T(130)W
GPSVFIFPPKPKDVLMITRMPEVTCLVVDVSHDSSDVLFTWYVDGTEVKTAKTMPNEEQNNSTYRVVSVLRIQHQDWLNGKKFKCKVNNQALPAPVERTISKATGQTRVPQVYVLAPHPDELSKNKVSVWCLVKDFYPPDITVEWQSNEHPEPEGKYRTTEAQKDSDGSYFLYSKLTVEKDRWQQGTTFTCVVMHEALHNHVMQKNISKNPGK

SEQ ID NO: 257 - protein, 213 aa, Artificial Sequence
  Synthetic: Exemplary variant equine IgG4 Fc  Bispecific knob T(130)W
GPSVFIFPPKPKDVLMISRTPTVTCVVVDVGHDFPDVQFNWYVDGVETHTATTEPKQEQFNSTYRVVSVLPIQHKDWLSGKEFKCKVNNKALPAPVERTISAPTGQPREPQVYVLAPHRDELSKNKVSVWCLVKDFYPPDIDIEWKSNGQPEPETKYSTTPAQLDSDGSYFLYSKLTVETNRWQQGTTFTCAVMHEALHNHYTEKSVSKSPGK

SEQ ID NO: 258 - protein, 213 aa, Artificial Sequence
  Synthetic: Exemplary variant equine IgG5 Fc  Bispecific knob T(130)W
GPSVFIFPPKPKDVLMISRKPEVTCVVVDLGHDDPDVQFTWFVDGVETHTATTEPKEEQFNSTYRVVSVLPIQHQDWLSGKEFKCSVTSKALPAPVERTISKAKGQLRVPQVYVLAPHPDELAKNTVSVWCLVKDFYPPEIDVEWQSNEHPEPEGKYSTTPAQLNSDGSYFLYSKLSVETSRWKQGESFTCGVMHEAVENHYTQKNVSHSPGK

SEQ ID NO: 259 - protein, 213 aa, Artificial Sequence
  Synthetic: Exemplary variant equine IgG6 Fc  Bispecific knob T(130)W
RPSVFIFPPNPKDTLMISRTPEVTCVVVDVSQENPDVKFNWYVDGVEAHTATTKAKEKQDNSTYRVVSVLPIQHQDWRRGKEFKCKVNNRALPAPVERTITKAKGELQDPKVYILAPHREEVTKNTVSVWCLVKDFYPPDINVEWQSNEEPEPEVKYSTTPAQLDGDGSYFLYSKLTVETDRWEQGESFTCVVMHEAIRHTYRQKSITNFPGK

SEQ ID NO: 260 - protein, 213 aa, Artificial Sequence
  Synthetic: Exemplary variant equine IgG7 Fc  Bispecific knob T(130)W
GPSVFIFPPKPKDVLMISRTPTVTCVVVDVGHDFPDVQFNWYVDGVETHTATTEPKQEQNNSTYRVVSILAIQHKDWLSGKEFKCKVNNQALPAPVQKTISKPTGQPREPQVYVLAPHPDELSKNKVSVWCLVKDFYPPDIDIEWKSNGQPEPETKYSTTPAQLDGDGSYFLYSKLTVETNRWQQGTTFTCAVMHEALHNHYTEKSVSKSPGK

SEQ ID NO: 261 - protein, 213 aa, Artificial Sequence
  Synthetic: Exemplary variant equine IgG1 Fc  Bispecific hole T(130)S L(132)A
GPSVFIFPPNPKDTLMITRTPEVTCVVVDVSQENPDVKFNWYMDGVEVRTATTRPKEEQFNSTYRVVSVLRIQHQDWLSGKEFKCKVNNQALPQPIERTITKTKGRSQEPQVYVLAPHPDELSKSKVSVSCAVKDFYPPEINIEWQSNGQPELETKYSTTQAQQDSDGSYFLYSKLSVDRNRWQQGTTFTCGVMHEALHNHYTQKNVSKNPGK

SEQ ID NO: 262 - protein, 213 aa, Artificial Sequence
  Synthetic: Exemplary variant equine IgG2 Fc  Bispecific hole T(130)S L(132)A
GPSVFIFPPNPKDALMISRTPVVTCVVVNLSDQYPDVQFSWYVDNTEVHSAITKQREAQFNSTYRVVSVLPIQHQDWLSGKEFKCSVTNVGVPQPISRAISRGKGPSRVPQVYVLPPHPDELAKSKVSVSCAVKDFYPPDISVEWQSNRWPELEGKYSTTPAQLDGDGSYFLYSKLSLETSRWQQVESFTCAVMHEALHNHFTKTDISESLGK

SEQ ID NO: 263 - protein, 213 aa, Artificial Sequence
  Synthetic: Exemplary variant equine IgG3 Fc  Bispecific hole T(130)S L(132)A
GPSVFIFPPKPKDVLMITRMPEVTCLVVDVSHDSSDVLFTWYVDGTEVKTAKTMPNEEQNNSTYRVVSVLRIQHQDWLNGKKFKCKVNNQALPAPVERTISKATGQTRVPQVYVLAPHPDELSKNKVSVSCAVKDFYPPDITVEWQSNEHPEPEGKYRTTEAQKDSDGSYFLYSKLTVEKDRWQQGTTFTCVVMHEALHNHVMQKNISKNPGK

SEQ ID NO: 264 - protein, 213 aa, Artificial Sequence
  Synthetic: Exemplary variant equine IgG4 Fc  Bispecific hole T(130)S L(132)A
GPSVFIFPPKPKDVLMISRTPTVTCVVVDVGHDFPDVQFNWYVDGVETHTATTEPKQEQFNSTYRVVSVLPIQHKDWLSGKEFKCKVNNKALPAPVERTISAPTGQPREPQVYVLAPHRDELSKNKVSVSCAVKDFYPPDIDIEWKSNGQPEPETKYSTTPAQLDSDGSYFLYSKLTVETNRWQQGTTFTCAVMHEALHNHYTEKSVSKSPGK

SEQ ID NO: 265 - protein, 213 aa, Artificial Sequence
  Synthetic: Exemplary variant equine IgG5 Fc  Bispecific hole T(130)S L(132)A
GPSVFIFPPKPKDVLMISRKPEVTCVVVDLGHDDPDVQFTWFVDGVETHTATTEPKEEQFNSTYRVVSVLPIQHQDWLSGKEFKCSVTSKALPAPVERTISKAKGQLRVPQVYVLAPHPDELAKNTVSVSCAVKDFYPPEIDVEWQSNEHPEPEGKYSTTPAQLNSDGSYFLYSKLSVETSRWKQGESFTCGVMHEAVENHYTQKNVSHSPGK

SEQ ID NO: 266 - protein, 213 aa, Artificial Sequence
  Synthetic: Exemplary variant equine IgG6 Fc  Bispecific hole T(130)S L(132)A
RPSVFIFPPNPKDTLMISRTPEVTCVVVDVSQENPDVKFNWYVDGVEAHTATTKAKEKQDNSTYRVVSVLPIQHQDWRRGKEFKCKVNNRALPAPVERTITKAKGELQDPKVYILAPHREEVTKNTVSVSCAVKDFYPPDINVEWQSNEEPEPEVKYSTTPAQLDGDGSYFLYSKLTVETDRWEQGESFTCVVMHEAIRHTYRQKSITNFPGK

SEQ ID NO: 267 - protein, 213 aa, Artificial Sequence
  Synthetic: Exemplary variant equine IgG7 Fc  Bispecific hole T(130)S L(132)A
GPSVFIFPPKPKDVLMISRTPTVTCVVVDVGHDFPDVQFNWYVDGVETHTATTEPKQEQNNSTYRVVSILAIQHKDWLSGKEFKCKVNNQALPAPVQKTISKPTGQPREPQVYVLAPHPDELSKNKVSVSCAVKDFYPPDIDIEWKSNGQPEPETKYSTTPAQLDGDGSYFLYSKLTVETNRWQQGTTFTCAVMHEALHNHYTEKSVSKSPGK

SEQ ID NO: 268 - protein, 9 aa, Artificial Sequence
  Synthetic: Alternative CDR-H2
  misc_feature (5)..(5): X is K, A, or N
YINPXNDGT

SEQ ID NO: 269 - protein, 9 aa, Artificial Sequence
  Synthetic: Alternative Clone B CDR-H2
YINPKNDGT

SEQ ID NO: 270 - protein, 40 aa, Artificial Sequence
  Synthetic: Alternative Clone B  HC-FR3
FYNGKFKGKATLTSDKSSSTAYMELSSLTSEDSAVYYCAA

SEQ ID NO: 271 - protein, 17 aa, Artificial Sequence
  Synthetic: Alternative Clone I CDR-H2
YINPNNDGTFYNGKFQG

SEQ ID NO: 272 - protein, 9 aa, Artificial Sequence
  Synthetic: Alternative Clone I CDR-H2
YINPNNDGT

SEQ ID NO: 273 - protein, 40 aa, Artificial Sequence; identical to SEQ ID NO: 270
  Synthetic: Alternative Clone I HC-FR3

SEQ ID NO: 274 - protein, 116 aa, Artificial Sequence
  Synthetic: Caninized Clone I variable HC v3
EVQLVQSAAEVKKPGASVKVSCKASGYTFTSYVMHWVRQAPGQGLEWIGYINPNNDGTFYNGKFQGRVTLTADTSTGTTYTELSSLRAEDTAVYYCAAFYYGFAYWGQGTLVTVSS

SEQ ID NO: 275 - protein, 107 aa, Artificial Sequence
  Synthetic: Caninized Clone I variable LC v3
DIVMTQTPLSLSVSPGETASISCRASQEISGYLSWLQQKPDGTIKRLIYAASTLDSGVPDRFSGSGSGTDFTLRISRVEADDTGVYYCLQYASYPWTFGAGTKVELK

SEQ ID NO: 276 - protein, 451 aa, Artificial Sequence
  Synthetic: Caninized Clone I variable HC v3 and  variant canine IgG-B  C1q -, CD16 -
EVQLVQSAAEVKKPGASVKVSCKASGYTFTSYVMHWVRQAPGQGLEWIGYINPNNDGTFYNGKFQGRVTLTADTSTGTTYTELSSLRAEDTAVYYCAAFYYGFAYWGQGTLVTVSSASTTAPSVFPLAPSCGSTSGSTVALACLVSGYFPEPVTVSWNSGSLTSGVHTFPSVLQSSGLYSLSSMVTVPSSRWPSETFTCNVAHPASKTKVDKPVPKRENGRVPRPPDCPKCPAPEPLGGPSVFIFPPKPKDTLLIARTPEVTCVVVDLDREDPEVQISWFVDGKQMQTAKTQPREEQFNGTYRVVSVLPIGHQDWLKGKQFTCRVNNKALPSPIERTISKARGQAHQPSVYVLPPSREELSKNTVSLTCLIKDFFPPDIDVEWQSNGQQEPESKYRTTPPQLDEDGSYFLYSKLSVDKSRWQRGDTFICAVMHEALHNHYTQESLSHSPGK

SEQ ID NO: 277 - protein, 217 aa, Artificial Sequence
  Synthetic: Caninized Clone I variable LC v3 and canine kappa light constant region
DIVMTQTPLSLSVSPGETASISCRASQEISGYLSWLQQKPDGTIKRLIYAASTLDSGVPDRFSGSGSGTDFTLRISRVEADDTGVYYCLQYASYPWTFGAGTKVELKRNDAQPAVYLFQPSPDQLHTGSASVVCLLNSFYPKDINVKWKVDGVIQDTGIQESVTEQDKDSTYSLSSTLTMSSTEYLSHELYSCEITHKSLPSTLIKSFQRSECQRVD

SEQ ID NO: 278 - protein, 13 aa, Artificial Sequence
  Synthetic: Clone M3 CDR-H1
TVSGFSLSRYSVH

SEQ ID NO: 279 - protein, 9 aa, Artificial Sequence
  Synthetic: Clone M3 CDR-H2
GMIWGGGST

SEQ ID NO: 280 - protein, 9 aa, Artificial Sequence
  Synthetic: Clone M3 CDR-H3
TYRGYALDY

SEQ ID NO: 281 - protein, 22 aa, Artificial Sequence
  Synthetic: Clone M3 HC-FR1
QVQLKESGPGLVAPSQSLSITC

SEQ ID NO: 282 - protein, 13 aa, Artificial Sequence
  Synthetic: Clone M3 HC-FR2
WVRQPPGKGLEWL

SEQ ID NO: 283 - protein, 40 aa, Artificial Sequence
  Synthetic: Clone M3 HC-FR3
DYNSVFKSRLSISKDNSKSQVFLKMNSLQTDDTAMYYCAR

SEQ ID NO: 284 - protein, 11 aa, Artificial Sequence
  Synthetic: Clone M3 HC-FR4
WGQGTSVTVSS

SEQ ID NO: 285 - protein, 11 aa, Artificial Sequence
  Synthetic: Clone M3 CDR-L1
RASQDISNYLN

SEQ ID NO: 286 - protein, 8 aa, Artificial Sequence
  Synthetic: Clone M3 CDR-L2
YYTSRLQS

SEQ ID NO: 287 - protein, 9 aa, Artificial Sequence
  Synthetic: Clone M3 CDR-L3
QQANTLPLT

SEQ ID NO: 288 - protein, 23 aa, Artificial Sequence
  Synthetic: Clone M3 LC-FR1
DIQMTQTTSSLSASLGDRVTISC

SEQ ID NO: 289 - protein, 14 aa, Artificial Sequence
  Synthetic: Clone M3 LC-FR2
WYQQKPDGTVKLLI

SEQ ID NO: 290 - protein, 32 aa, Artificial Sequence
  Synthetic: Clone M3 LC-FR3
GVPSRFSGSGSGTDYCLTISNLEQEDIATYFC

SEQ ID NO: 291 - protein, 10 aa, Artificial Sequence
  Synthetic: Clone M3 LC-FR4
FGSGTKLELK

SEQ ID NO: 292 - protein, 117 aa, Artificial Sequence
  Synthetic: Clone M3 variable HC
QVQLKESGPGLVAPSQSLSITCTVSGFSLSRYSVHWVRQPPGKGLEWLGMIWGGGSTDYNSVFKSRLSISKDNSKSQVFLKMNSLQTDDTAMYYCARTYRGYALDYWGQGTSVTVSS

SEQ ID NO: 293 - protein, 107 aa, Artificial Sequence
  Synthetic: Clone M3 variable LC
DIQMTQTTSSLSASLGDRVTISCRASQDISNYLNWYQQKPDGTVKLLIYYTSRLQSGVPSRFSGSGSGTDYCLTISNLEQEDIATYFCQQANTLPLTFGSGTKLELK

SEQ ID NO: 294 - protein, 13 aa, Artificial Sequence
  Synthetic: Clone M5 CDR-H1
TVSGFSLSRYSVH

SEQ ID NO: 295 - protein, 9 aa, Artificial Sequence
  Synthetic: Clone M5 CDR-H2
GMIWGGGST

SEQ ID NO: 296 - protein, 9 aa, Artificial Sequence
  Synthetic: Clone M5 CDR-H3
TYRGYALDY

SEQ ID NO: 297 - protein, 22 aa, Artificial Sequence
  Synthetic: Clone M5 HC-FR1
QVQLKESGPGLVAPSQSLSITC

SEQ ID NO: 298 - protein, 13 aa, Artificial Sequence
  Synthetic: Clone M5 HC-FR2
WVRQPPGKGLEWL

SEQ ID NO: 299 - protein, 40 aa, Artificial Sequence; identical to SEQ ID NO: 283
  Synthetic: Clone M5 HC-FR3

SEQ ID NO: 300 - protein, 11 aa, Artificial Sequence
  Synthetic: Clone M5 HC-FR4
WGQGTSVTVSS

SEQ ID NO: 301 - protein, 11 aa, Artificial Sequence
  Synthetic: Clone M5 CDR-L1
RASQDISNYLN

SEQ ID NO: 302 - protein, 8 aa, Artificial Sequence
  Synthetic: Clone M5 CDR-L2
YYTSRLQS

SEQ ID NO: 303 - protein, 9 aa, Artificial Sequence
  Synthetic: Clone M5 CDR-L3
QQANTLPLT

SEQ ID NO: 304 - protein, 23 aa, Artificial Sequence
  Synthetic: Clone M5 LC-FR1
DIQMTQTTSSLSASLGDRVTISC

SEQ ID NO: 305 - protein, 14 aa, Artificial Sequence
  Synthetic: Clone M5 LC-FR2
WYQQKPDGTVKLLI

SEQ ID NO: 306 - protein, 32 aa, Artificial Sequence; identical to SEQ ID NO: 290
  Synthetic: Clone M5 LC-FR3

SEQ ID NO: 307 - protein, 10 aa, Artificial Sequence
  Synthetic: Clone M5 LC-FR4
FGSGTKLELK

SEQ ID NO: 308 - protein, 117 aa, Artificial Sequence; identical to SEQ ID NO: 292
  Synthetic: Clone M5 variable HC

SEQ ID NO: 309 - protein, 107 aa, Artificial Sequence; identical to SEQ ID NO: 293
  Synthetic: Clone M5 variable LC

SEQ ID NO: 310 - protein, 13 aa, Artificial Sequence
  Synthetic: Clone M8 CDR-H1
KASGYTFTSYDIN

SEQ ID NO: 311 - protein, 11 aa, Artificial Sequence
  Synthetic: Clone M8 CDR-H2
GWIYPGDGSTK

SEQ ID NO: 312 - protein, 5 aa, Artificial Sequence
  Synthetic: Clone M8 CDR-H3
SSFVV

SEQ ID NO: 313 - protein, 22 aa, Artificial Sequence
  Synthetic: Clone M8 HC-FR1
QVQLQQSGPELVKPGALVKISC

SEQ ID NO: 314 - protein, 13 aa, Artificial Sequence
  Synthetic: Clone M8 HC-FR2
WVKQRPGQGLEWI

SEQ ID NO: 315 - protein, 39 aa, Artificial Sequence
  Synthetic: Clone M8 HC-FR3
YNEKFKGKATLTADKSSSTAYMQLSSLTSEDSAVYFCAR

SEQ ID NO: 316 - protein, 11 aa, Artificial Sequence
  Synthetic: Clone M8 HC-FR4
WGAGTTVTVSS

SEQ ID NO: 317 - protein, 11 aa, Artificial Sequence
  Synthetic: Clone M8 CDR-L1
KASDPINNWLA

SEQ ID NO: 318 - protein, 8 aa, Artificial Sequence
  Synthetic: Clone M8 CDR-L2
SGATSLET

SEQ ID NO: 319 - protein, 9 aa, Artificial Sequence
  Synthetic: Clone M8 CDR-L3
HQYWSIPYT

SEQ ID NO: 320 - protein, 23 aa, Artificial Sequence
  Synthetic: Clone M8 LC-FR1
DIQMTQSSSYLSVSLGGRVTITC

SEQ ID NO: 321 - protein, 14 aa, Artificial Sequence
  Synthetic: Clone M8 LC-FR2
WYQQKPGNAPRLLI

SEQ ID NO: 322 - protein, 32 aa, Artificial Sequence
  Synthetic: Clone M8 LC-FR3
GVPSRISGSGSGKDYSLSITSLQTEDIATYYC

SEQ ID NO: 323 - protein, 10 aa, Artificial Sequence
  Synthetic: Clone M8 LC-FR4
FGGGTKLEIK

SEQ ID NO: 324 - protein, 114 aa, Artificial Sequence
  Synthetic: Clone M8 variable HC
QVQLQQSGPELVKPGALVKISCKASGYTFTSYDINWVKQRPGQGLEWIGWIYPGDGSTKYNEKFKGKATLTADKSSSTAYMQLSSLTSEDSAVYFCARSSFVVWGAGTTVTVSS

SEQ ID NO: 325 - protein, 107 aa, Artificial Sequence
  Synthetic: Clone M8 variable LC
DIQMTQSSSYLSVSLGGRVTITCKASDPINNWLAWYQQKPGNAPRLLISGATSLETGVPSRISGSGSGKDYSLSITSLQTEDIATYYCHQYWSIPYTFGGGTKLEIK

SEQ ID NO: 326 - protein, 13 aa, Artificial Sequence
  Synthetic: Clone M9 CDR-H1
AASGFTFSSFGMH

SEQ ID NO: 327 - protein, 11 aa, Artificial Sequence
  Synthetic: Clone M9 CDR-H2
AYIRSDSSTIY

SEQ ID NO: 328 - protein, 11 aa, Artificial Sequence
  Synthetic: Clone M9 CDR-H3
SGYYGSFSLTY

SEQ ID NO: 329 - protein, 22 aa, Artificial Sequence
  Synthetic: Clone M9 HC-FR1
DVQLVESGGGLVQPGGSRKLSC

SEQ ID NO: 330 - protein, 13 aa, Artificial Sequence
  Synthetic: Clone M9 HC-FR2
WVRQAPEKGLEWV

SEQ ID NO: 331 - protein, 39 aa, Artificial Sequence
  Synthetic: Clone M9 HC-FR3
YADTVKGRFTISRDNPKNTLFLQMTSLRSEDTAMYYCAR

SEQ ID NO: 332 - protein, 11 aa, Artificial Sequence
  Synthetic: Clone M9 HC-FR4
WGQGTLVTVSA

SEQ ID NO: 333 - protein, 12 aa, Artificial Sequence
  Synthetic: Clone M9 CDR-L1
SASSSVSSNYLH

SEQ ID NO: 334 - protein, 8 aa, Artificial Sequence
  Synthetic: Clone M9 CDR-L2
YRTSNLPS

SEQ ID NO: 335 - protein, 8 aa, Artificial Sequence
  Synthetic: Clone M9 CDR-L3
QQGSGMLT

SEQ ID NO: 336 - protein, 23 aa, Artificial Sequence
  Synthetic: Clone M9 LC-FR1
EIVLTQSPTTMAASPGEKITITC

SEQ ID NO: 337 - protein, 14 aa, Artificial Sequence
  Synthetic: Clone M9 LC-FR2
WYQQKPGFSPKLLI

SEQ ID NO: 338 - protein, 32 aa, Artificial Sequence
  Synthetic: Clone M9 LC-FR3
GVPARFFGSGSGTSYSLTIGTMEAEDVATYYC

SEQ ID NO: 339 - protein, 10 aa, Artificial Sequence
  Synthetic: Clone M9 LC-FR4
FGAGTKLELK

SEQ ID NO: 340 - protein, 120 aa, Artificial Sequence
  Synthetic: Clone M9 variable HC
DVQLVESGGGLVQPGGSRKLSCAASGFTFSSFGMHWVRQAPEKGLEWVAYIRSDSSTIYYADTVKGRFTISRDNPKNTLFLQMTSLRSEDTAMYYCARSGYYGSFSLTYWGQGTLVTVSA

SEQ ID NO: 341 - protein, 107 aa, Artificial Sequence
  Synthetic: Clone M9 variable LC
EIVLTQSPTTMAASPGEKITITCSASSSVSSNYLHWYQQKPGFSPKLLIYRTSNLPSGVPARFFGSGSGTSYSLTIGTMEAEDVATYYCQQGSGMLTFGAGTKLELK

SEQ ID NO: 342 - protein, 117 aa, Artificial Sequence
  Synthetic: Caninized Clone M3 variable HC v1
EVQLVESGGDLVKPAGSLRLSCTVSGFSLSRYSVHWVRQAPGKGLEWLGMIWGGGSTDYNSVVKGRFTISRDNAKNTVYLQMNSLRAEDTAMYYCARTYRGYALDYWGQGTLVTVSS

SEQ ID NO: 343 - protein, 117 aa, Artificial Sequence
  Synthetic: Caninized Clone M3 variable HC v2
ELTLQESGPGLVKPSQTLSLTCTVSGFSLSRYSVHWIRQPRGRGLELLGMIWGGGSTDYNPAFQGRISITADTAKNQFSLQLSSMTTEDTAVYYCARTYRGYALDYWGQGTLVTVSS

SEQ ID NO: 344 - protein, 107 aa, Artificial Sequence
  Synthetic: Caninized Clone M3 variable LC v1
DIVMTQTPLSLSVSPGEPASISCRASQDISNYLNWYLQKAGQSPRLLIYYTSRLQSGVPDRFSGSGSGTDFTLRIGRVEAEDAGIYFCQQANTLPLTFGQGTRLEVR

SEQ ID NO: 345 - protein, 120 aa, Artificial Sequence
  Synthetic: Caninized Clone M9 variable HC v1
EVQLVESGGDLVKPGGSLRLSCAASGFTFSSFGMHWVRQAPGKGLEWVAYIRSDSSTIYYADAVKGRFTISRDNAKNTLYLQMNSLRAEDTAMYYCARSGYYGSFSLTYWGQGTLVTVSS

SEQ ID NO: 346 - protein, 120 aa, Artificial Sequence
  Synthetic: Caninized Clone M9 variable HC v2
EVQLVESGGDLVKPGGSLRLSCVASGFTFSSFGMHWVRQAPGKGLQWVAYIRSDSSTIYYADAVKGRFTISRDNAKNTLYLQMNSLRAEDTAMYYCARSGYYGSFSLTYWGQGTLVTVSS

SEQ ID NO: 347 - protein, 107 aa, Artificial Sequence
  Synthetic: Caninized Clone M9 variable LC v1
DIMLTQTPLSLSVSPGEPASISCSASSSVSSNYLHWYLQKAGQSPRLLIYRTSNLPSGVPDRFSGSGSGTDFTLRIGRVEAEDAGIYYCQQGSGMLTFGQGTRLEVR

SEQ ID NO: 348 - protein, 452 aa, Artificial Sequence
  Synthetic: Caninized Clone M3 variable HC v1 and  variant canine IgG-B  C1q -, CD16 -
EVQLVESGGDLVKPAGSLRLSCTVSGFSLSRYSVHWVRQAPGKGLEWLGMIWGGGSTDYNSVVKGRFTISRDNAKNTVYLQMNSLRAEDTAMYYCARTYRGYALDYWGQGTLVTVSSASTTAPSVFPLAPSCGSTSGSTVALACLVSGYFPEPVTVSWNSGSLTSGVHTFPSVLQSSGLYSLSSMVTVPSSRWPSETFTCNVAHPASKTKVDKPVPKRENGRVPRPPDCPKCPAPEPLGGPSVFIFPPKPKDTLLIARTPEVTCVVVDLDREDPEVQISWFVDGKQMQTAKTQPREEQFNGTYRVVSVLPIGHQDWLKGKQFTCRVNNKALPSPIERTISKARGQAHQPSVYVLPPSREELSKNTVSLTCLIKDFFPPDIDVEWQSNGQQEPESKYRTTPPQLDEDGSYFLYSKLSVDKSRWQRGDTFICAVMHEALHNHYTQESLSHSPGK

SEQ ID NO: 349 - protein, 452 aa, Artificial Sequence
  Synthetic: Caninized Clone M3 variable HC v2 and  variant canine IgG-B  C1q -, CD16 -
ELTLQESGPGLVKPSQTLSLTCTVSGFSLSRYSVHWIRQPRGRGLELLGMIWGGGSTDYNPAFQGRISITADTAKNQFSLQLSSMTTEDTAVYYCARTYRGYALDYWGQGTLVTVSSASTTAPSVFPLAPSCGSTSGSTVALACLVSGYFPEPVTVSWNSGSLTSGVHTFPSVLQSSGLYSLSSMVTVPSSRWPSETFTCNVAHPASKTKVDKPVPKRENGRVPRPPDCPKCPAPEPLGGPSVFIFPPKPKDTLLIARTPEVTCVVVDLDREDPEVQISWFVDGKQMQTAKTQPREEQFNGTYRVVSVLPIGHQDWLKGKQFTCRVNNKALPSPIERTISKARGQAHQPSVYVLPPSREELSKNTVSLTCLIKDFFPPDIDVEWQSNGQQEPESKYRTTPPQLDEDGSYFLYSKLSVDKSRWQRGDTFICAVMHEALHNHYTQESLSHSPGK

SEQ ID NO: 350 - protein, 217 aa, Artificial Sequence
  Synthetic: Caninized Clone M3 variable LC v1 and canine kappa light constant region
DIVMTQTPLSLSVSPGEPASISCRASQDISNYLNWYLQKAGQSPRLLIYYTSRLQSGVPDRFSGSGSGTDFTLRIGRVEAEDAGIYFCQQANTLPLTFGQGTRLEVRRNDAQPAVYLFQPSPDQLHTGSASVVCLLNSFYPKDINVKWKVDGVIQDTGIQESVTEQDKDSTYSLSSTLTMSSTEYLSHELYSCEITHKSLPSTLIKSFQRSECQRVD

SEQ ID NO: 351 - protein, 455 aa, Artificial Sequence
  Synthetic: Caninized Clone M9 variable HC v1 and  variant canine IgG-B  C1q -, CD16 -
EVQLVESGGDLVKPGGSLRLSCAASGFTFSSFGMHWVRQAPGKGLEWVAYIRSDSSTIYYADAVKGRFTISRDNAKNTLYLQMNSLRAEDTAMYYCARSGYYGSFSLTYWGQGTLVTVSSASTTAPSVFPLAPSCGSTSGSTVALACLVSGYFPEPVTVSWNSGSLTSGVHTFPSVLQSSGLYSLSSMVTVPSSRWPSETFTCNVAHPASKTKVDKPVPKRENGRVPRPPDCPKCPAPEPLGGPSVFIFPPKPKDTLLIARTPEVTCVVVDLDREDPEVQISWFVDGKQMQTAKTQPREEQFNGTYRVVSVLPIGHQDWLKGKQFTCRVNNKALPSPIERTISKARGQAHQPSVYVLPPSREELSKNTVSLTCLIKDFFPPDIDVEWQSNGQQEPESKYRTTPPQLDEDGSYFLYSKLSVDKSRWQRGDTFICAVMHEALHNHYTQESLSHSPGK

SEQ ID NO: 352 - protein, 455 aa, Artificial Sequence
  Synthetic: Caninized Clone M9 variable HC v2 and  variant canine IgG-B  C1q -, CD16 -
EVQLVESGGDLVKPGGSLRLSCVASGFTFSSFGMHWVRQAPGKGLQWVAYIRSDSSTIYYADAVKGRFTISRDNAKNTLYLQMNSLRAEDTAMYYCARSGYYGSFSLTYWGQGTLVTVSSASTTAPSVFPLAPSCGSTSGSTVALACLVSGYFPEPVTVSWNSGSLTSGVHTFPSVLQSSGLYSLSSMVTVPSSRWPSETFTCNVAHPASKTKVDKPVPKRENGRVPRPPDCPKCPAPEPLGGPSVFIFPPKPKDTLLIARTPEVTCVVVDLDREDPEVQISWFVDGKQMQTAKTQPREEQFNGTYRVVSVLPIGHQDWLKGKQFTCRVNNKALPSPIERTISKARGQAHQPSVYVLPPSREELSKNTVSLTCLIKDFFPPDIDVEWQSNGQQEPESKYRTTPPQLDEDGSYFLYSKLSVDKSRWQRGDTFICAVMHEALHNHYTQESLSHSPGK

SEQ ID NO: 353 - protein, 217 aa, Artificial Sequence
  Synthetic: Caninized Clone M9 variable LC v1 and canine kappa light constant region
DIMLTQTPLSLSVSPGEPASISCSASSSVSSNYLHWYLQKAGQSPRLLIYRTSNLPSGVPDRFSGSGSGTDFTLRIGRVEAEDAGIYYCQQGSGMLTFGQGTRLEVRRNDAQPAVYLFQPSPDQLHTGSASVVCLLNSFYPKDINVKWKVDGVIQDTGIQESVTEQDKDSTYSLSSTLTMSSTEYLSHELYSCEITHKSLPSTLIKSFQRSECQRVD

SEQ ID NO: 354 - protein, 14 aa, Artificial Sequence
  Synthetic: M3 canine IL4R epitope
DFMGSENHTCVPEN

SEQ ID NO: 355 - protein, 33 aa, Artificial Sequence
  Synthetic: M8 canine IL4R   epitope 1
GSVKVLHEPSCFSDYISTSVCQWKMDHPTNCSA

SEQ ID NO: 356 - protein, 12 aa, Artificial Sequence
  Synthetic: M8 canine IL4R   epitope 2
REDSVCVCSMPI

SEQ ID NO: 357 - protein, 20 aa, Artificial Sequence
  Synthetic: M9 canine IL4R epitope
REDSVCVCSMPIDDAVEADV

SEQ ID NO: 358 - protein, 10 aa, Artificial Sequence
  Synthetic: Alternative Clone I CDR-H1
GYTFTSYVMN

SEQ ID NO: 359 - protein, 17 aa, Artificial Sequence
  Synthetic: Alternative Clone I CDR-H2
YINPNNDGTFYADSVKG

SEQ ID NO: 360 - protein, 11 aa, Artificial Sequence
  Synthetic: Alternative Clone I CDR-L1
RASQEISGYLA

SEQ ID NO: 361 - protein, 7 aa, Artificial Sequence
  Synthetic: Alternative Clone I CDR-L2
AASTLQT

SEQ ID NO: 362 - protein, 7 aa, Artificial Sequence
  Synthetic: Alternative Clone I CDR-L2
AASTLDT

SEQ ID NO: 363 - protein, 116 aa, Artificial Sequence; identical to SEQ ID NO: 64
  Synthetic: Caninized Clone I variable HC v4

SEQ ID NO: 364 - protein, 107 aa, Artificial Sequence
  Synthetic: Caninized Clone I variable LC v4
DIVMTQTPLSLSVSPGETASISCRASQEISGYLSWLQQKPGGTIKRLIYAASTLDSGVPDRFSGSRSGTDFTLRISRVEADDTGVYYCLQYASYPWTFGGGTKVELK

SEQ ID NO: 365 - protein, 116 aa, Artificial Sequence
  Synthetic: Felinized Clone I variable HC v2
DVQLVESGGDLVKPGGSLRLTCKASGYTFTSYVMNWVRQAPKQGLQWVAYINPNNDGTFYADSVKGRFTISRDNAKNTLYLQMNSLKTEDTATYYCAAFYYGFAYWGQGTLVTVSS

SEQ ID NO: 366 - protein, 116 aa, Artificial Sequence
  Synthetic: Felinized Clone I variable HC v3
DVQLVESGGDLVKPGGSLRLTCKASGYTFTSYVMHWVKQKPGQGLEWIGYINPNNDGTFYNGKFKGRFTISRDNAKNTLYLQMNSLKTEDTATYYCAAFYYGFAYWGQGTLVTVSS

SEQ ID NO: 367 - protein, 107 aa, Artificial Sequence
  Synthetic: Felinized Clone I variable LC v2
EIQMTQSPSSLSASPGDRVTITCRASQEISGYLAWYQQKPGKVPKLLIYAASTLQTGVPSRFSGSGSGTDFTLTISSLEPEDAATYYCLQYASYPWTFGQGTKLEIK

SEQ ID NO: 368 - protein, 107 aa, Artificial Sequence
  Synthetic: Felinized Clone I variable LC v3
EIQMTQSPSSLSASPGDRVTITCRASQEISGYLSWLQQKPDGTIKRLIYAASTLDTGVPSRFSGSGSGTDFTLTISSLEPEDAATYYCLQYASYPWTFGQGTKLEIK

SEQ ID NO: 369 - protein, 107 aa, Artificial Sequence
  Synthetic: Felinized Clone I variable LC v4
EITMTQSPGSLAGSPGQQVTMNCRASQEISGYLSWLQQKPDGTIKRLIYAASTLDSGVPDRFSGSGSGTDFTLTISNLQAEDVASYYCLQYASYPWTFGQGTKLEIK

SEQ ID NO: 370 - protein, 451 aa, Artificial Sequence
  Synthetic: Caninized Clone I variable HC v4 and  variant canine IgG-B  C1q -, CD16 -
EVQLVQSGAEVKKPGASVKVSCKASGYTFTSYVMHWVRQAPGQGLEWMGYINPNNDGTFYNGKFQGRVTLTADTSTSTAYMELSSLRAGDIAVYYCAAFYYGFAYWGQGTLVTVSSASTTAPSVFPLAPSCGSTSGSTVALACLVSGYFPEPVTVSWNSGSLTSGVHTFPSVLQSSGLYSLSSMVTVPSSRWPSETFTCNVAHPASKTKVDKPVPKRENGRVPRPPDCPKCPAPEMLGGPSVFIFPPKPKDTLLIARTPEVTCVVVDLDPEDPEVQISWFVDGKQMQTAKTQPREEQFNGTYRVVSVLPIGHQDWLKGKQFTCRVNNIGLPSPIERTISKARGQAHQPSVYVLPPSREELSKNTVSLTCLIKDFFPPDIDVEWQSNGQQEPESKYRTTPPQLDEDGSYFLYSKLSVDKSRWQRGDTFICAVMHEALHNHYTQESLSHSPGK

SEQ ID NO: 371 - protein, 237 aa, Artificial Sequence
  Synthetic: Caninized Clone I variable LC v4 and canine kappa light constant region
MSVPTQVLGLLLLWLTDARCDIVMTQTPLSLSVSPGETASISCRASQEISGYLSWLQQKPGGTIKRLIYAASTLDSGVPDRFSGSRSGTDFTLRISRVEADDTGVYYCLQYASYPWTFGGGTKVELKRNDAQPAVYLFQPSPDQLHTGSASVVCLLNSFYPKDINVKWKVDGVIQDTGIQESVTEQDKDSTYSLSSTLTMSSTEYLSHELYSCEITHKSLPSTLIKSFQRSECQRVD

SEQ ID NO: 372 - protein, 451 aa, Artificial Sequence
  Synthetic: Felinized Clone I variable HC v2 and variant feline IgG2 with hinge Cys modification
DVQLVESGGDLVKPGGSLRLTCKASGYTFTSYVMNWVRQAPKQGLQWVAYINPNNDGTFYADSVKGRFTISRDNAKNTLYLQMNSLKTEDTATYYCAAFYYGFAYWGQGTLVTVSSASTTASSVFPLAPSCGTTSGATVALACLVLGYFPEPVTVSWNSGALTSGVHTFPSVLQASGLYSLSSMVTVPSSRWLSDTFTCNVAHRPSSTKVDKTVPKTASTIESKTGECPKCPVPEIPGAPSVFIFPPKPKDTLSISRTPEVTCLVVDLGPDDSNVQITWFVDNTEMHTAKTRPREEQFNSTYRVVSVLPILHQDWLKGKEFKCKVNSKSLPSAMERTISKAKGQPHEPQVYVLPPTQEELSENKVSVTCLIKGFHPPDIAVEWEITGQPEPENNYQTTPPQLDSDGTYFLYSRLSVDRSHWQRGNTYTCSVSHEALHSHHTQKSLTQSPGK

SEQ ID NO: 373 - protein, 451 aa, Artificial Sequence
  Synthetic: Felinized Clone I variable HC v3 and variant feline IgG2 with hinge Cys modification
DVQLVESGGDLVKPGGSLRLTCKASGYTFTSYVMHWVKQKPGQGLEWIGYINPNNDGTFYNGKFKGRFTISRDNAKNTLYLQMNSLKTEDTATYYCAAFYYGFAYWGQGTLVTVSSASTTASSVFPLAPSCGTTSGATVALACLVLGYFPEPVTVSWNSGALTSGVHTFPSVLQASGLYSLSSMVTVPSSRWLSDTFTCNVAHRPSSTKVDKTVPKTASTIESKTGECPKCPVPEIPGAPSVFIFPPKPKDTLSISRTPEVTCLVVDLGPDDSNVQITWFVDNTEMHTAKTRPREEQFNSTYRVVSVLPILHQDWLKGKEFKCKVNSKSLPSAMERTISKAKGQPHEPQVYVLPPTQEELSENKVSVTCLIKGFHPPDIAVEWEITGQPEPENNYQTTPPQLDSDGTYFLYSRLSVDRSHWQRGNTYTCSVSHEALHSHHTQKSLTQSPGK

SEQ ID NO: 374 - protein, 451 aa, Artificial Sequence
  Synthetic: Felinized Clone I variable HC v2 and variant feline IgG2 with feline IgG1 hinge
DVQLVESGGDLVKPGGSLRLTCKASGYTFTSYVMNWVRQAPKQGLQWVAYINPNNDGTFYADSVKGRFTISRDNAKNTLYLQMNSLKTEDTATYYCAAFYYGFAYWGQGTLVTVSSASTTASSVFPLAPSCGTTSGATVALACLVLGYFPEPVTVSWNSGALTSGVHTFPSVLQASGLYSLSSMVTVPSSRWLSDTFTCNVAHRPSSTKVDKTVRKTDHPPGPKPCDCPKCPPPEMLGGPSVFIFPPKPKDTLSISRTPEVTCLVVDLGPDDSNVQITWFVDNTEMHTAKTRPREEQFNSTYRVVSVLPILHQDWLKGKEFKCKVNSKSLPSAMERTISKAKGQPHEPQVYVLPPTQEELSENKVSVTCLIKGFHPPDIAVEWEITGQPEPENNYQTTPPQLDSDGTYFLYSRLSVDRSHWQRGNTYTCSVSHEALHSHHTQKSLTQSPGK

SEQ ID NO: 375 - protein, 451 aa, Artificial Sequence
  Synthetic: Felinized Clone I variable HC v3 and variant feline IgG2 with feline IgG1 hinge
DVQLVESGGDLVKPGGSLRLTCKASGYTFTSYVMHWVKQKPGQGLEWIGYINPNNDGTFYNGKFKGRFTISRDNAKNTLYLQMNSLKTEDTATYYCAAFYYGFAYWGQGTLVTVSSASTTASSVFPLAPSCGTTSGATVALACLVLGYFPEPVTVSWNSGALTSGVHTFPSVLQASGLYSLSSMVTVPSSRWLSDTFTCNVAHRPSSTKVDKTVRKTDHPPGPKPCDCPKCPPPEMLGGPSVFIFPPKPKDTLSISRTPEVTCLVVDLGPDDSNVQITWFVDNTEMHTAKTRPREEQFNSTYRVVSVLPILHQDWLKGKEFKCKVNSKSLPSAMERTISKAKGQPHEPQVYVLPPTQEELSENKVSVTCLIKGFHPPDIAVEWEITGQPEPENNYQTTPPQLDSDGTYFLYSRLSVDRSHWQRGNTYTCSVSHEALHSHHTQKSLTQSPGK

SEQ ID NO: 376 - protein, 217 aa, Artificial Sequence
  Synthetic: Felinized Clone I variable LC v2 and feline kappa light constant region
EIQMTQSPSSLSASPGDRVTITCRASQEISGYLAWYQQKPGKVPKLLIYAASTLQTGVPSRFSGSGSGTDFTLTISSLEPEDAATYYCLQYASYPWTFGQGTKLEIKRSDAQPSVFLFQPSLDELHTGSASIVCILNDFYPKEVNVKWKVDGVVQNKGIQESTTEQNSKDSTYSLSSTLTMSSTEYQSHEKFSCEVTHKSLASTLVKSFNRSECQRE

SEQ ID NO: 377 - protein, 217 aa, Artificial Sequence
  Synthetic: Felinized Clone I variable LC v3 and feline kappa light constant region
EIQMTQSPSSLSASPGDRVTITCRASQEISGYLSWLQQKPDGTIKRLIYAASTLDTGVPSRFSGSGSGTDFTLTISSLEPEDAATYYCLQYASYPWTFGQGTKLEIKRSDAQPSVFLFQPSLDELHTGSASIVCILNDFYPKEVNVKWKVDGVVQNKGIQESTTEQNSKDSTYSLSSTLTMSSTEYQSHEKFSCEVTHKSLASTLVKSFNRSECQRE

SEQ ID NO: 378 - protein, 217 aa, Artificial Sequence
  Synthetic: Felinized Clone I variable LC v4 and feline kappa light constant region
EITMTQSPGSLAGSPGQQVTMNCRASQEISGYLSWLQQKPDGTIKRLIYAASTLDSGVPDRFSGSGSGTDFTLTISNLQAEDVASYYCLQYASYPWTFGQGTKLEIKRSDAQPSVFLFQPSLDELHTGSASIVCILNDFYPKEVNVKWKVDGVVQNKGIQESTTEQNSKDSTYSLSSTLTMSSTEYQSHEKFSCEVTHKSLASTLVKSFNRSECQRE

SEQ ID NO: 379 - protein, 305 aa, Artificial Sequence
  Synthetic: Exemplary canine FcRn with poly-His
MGVPRPRSWGLGFLLFLLPTLRAADSHLSLLYHLTAVSAPPPGTPAFWASGWLGPQQYLSYNNLRAQAEPYGAWVWENQVSWYWEKETTDLRTKEGLFLEALKALGDGGPYTLQGLLGCELGPDNTSVPVAKFALNGEDFMTFDPKLGTWNGDWPETETVSKRWMQQAGAVSKERTFLLYSCPQRLLGHLERGRGNLEWKEPPSMRLKARPGSPGFSVLTCSAFSFYPPELQLRFLRNGLAAGSGEGDFGPNGDGSFHAWSSLTVKSGDEHHYRCLVQHAGLPQPLTVELESPAKSSGSHHHHHH

SEQ ID NO: 380 - protein, 125 aa, Artificial Sequence
  Synthetic: Exemplary canine B2M
MAPRPALATAGFLALLLILLAACRLDAVQHPPKIQVYSRHPAENGKPNFLNCYVSGFHPPEIEIDLLKNGKEMKAEQTDLSFSKDWTFYLLVHTEFTPNEQDEFSCRVKHVTLSEPQIVKWDRDN

SEQ ID NO: 381 - protein, 220 aa, Artificial Sequence
  Synthetic: Exemplary variant canine IgG-B Fc  Protein A + C1q + CD16 +   L(23)F (F00)
PAPEMLGGPSVFIFPPKPKDTLFIARTPEVTCVVVDLDPEDPEVQISWFVDGKQMQTAKTQPREEQFNGTYRVVSVLPIGHQDWLKGKQFTCKVNNKALPSPIERTISKARGQAHQPSVYVLPPSREELSKNTVSLTCLIKDFFPPDIDVEWQSNGQQEPESKYRTTPPQLDEDGSYFLYSKLSVDKSRWQRGDTFICAVMHEALHNHYTQESLSHSPGK

SEQ ID NO: 382 - protein, 220 aa, Artificial Sequence
  Synthetic: Exemplary variant canine IgG-B Fc   Protein A + C1q + CD16 +   L(23)Y (Y00)
PAPEMLGGPSVFIFPPKPKDTLYIARTPEVTCVVVDLDPEDPEVQISWFVDGKQMQTAKTQPREEQFNGTYRVVSVLPIGHQDWLKGKQFTCKVNNKALPSPIERTISKARGQAHQPSVYVLPPSREELSKNTVSLTCLIKDFFPPDIDVEWQSNGQQEPESKYRTTPPQLDEDGSYFLYSKLSVDKSRWQRGDTFICAVMHEALHNHYTQESLSHSPGK

SEQ ID NO: 383 - protein, 221 aa, Artificial Sequence
  Synthetic: Exemplary variant canine IgG-A Fc (F00; Protein A+; C1q -; CD16 -)  I(21)T; R(23)F; T(25)A; E(80)G; T(205)A; Q(207)H
PVPEPLGGPSVLIFPPKPKDTLFIARTPEVTCVVLDLGREDPEVQISWFVDGKEVHTAKTQSREQQFNGTYRVVSVLPIGHQDWLTGKEFKCRVNHIDLPSPIERTISKARGRAHKPSVYVLPPSPKELSSSDTVSITCLIKDFYPPDIDVEWQSNGQQEPERKHRMTPPQLDEDGSYFLYSKLSVDKSRWQQGDPFTCAVMHEALHNHYTDLSLSHSPGK

SEQ ID NO: 384 - protein, 221 aa, Artificial Sequence
  Synthetic: Exemplary variant canine IgG-A Fc (Protein A+; C1q +; CD16 +)  V2A; P5M; I21T; R23L; T25A; L35V; G38D; R39P; Q65E; E80G; R93K; H96N; I97K; D98A; T205A; Q207H
PAPEMLGGPSVLIFPPKPKDTLLIARTPEVTCVVVDLDPEDPEVQISWFVDGKEVHTAKTQSREEQFNGTYRVVSVLPIGHQDWLTGKEFKCKVNNKALPSPIERTISKARGRAHKPSVYVLPPSPKELSSSDTVSITCLIKDFYPPDIDVEWQSNGQQEPERKHRMTPPQLDEDGSYFLYSKLSVDKSRWQQGDPFTCAVMHEALHNHYTDLSLSHSPGK

SEQ ID NO: 385 - protein, 221 aa, Artificial Sequence
  Synthetic: Exemplary variant canine IgG-D Fc (F00; Protein A+; C1q -; CD16 -)  I(21)T; R(23)F; T(25)A; E(80)G; Q(205)A; Q(207)H
PVPESLGGPSVFIFPPKPKDTLFIARTPEITCVVLDLGREDPEVQISWFVDGKEVHTAKTQPREQQFNSTYRVVSVLPIGHQDWLTGKEFKCRVNHIGLPSPIERTISKARGQAHQPSVYVLPPSPKELSSSDTVTLTCLIKDFFPPEIDVEWQSNGQPEPESKYHTTAPQLDEDGSYFLYSKLSVDKSRWQQGDTFTCAVMHEALHNHYTDLSLSHSPGK

SEQ ID NO: 386 - protein, 221 aa, Artificial Sequence
  Synthetic: Exemplary variant canine IgG-D Fc (Protein A+; C1q +; CD16 +)  V2A; S5M; I21T; R23L; T25A; L35V; G38D; R39P; Q65E; E80G; R93K; H96N; I97K; G98A; Q207H
PAPEMLGGPSVFIFPPKPKDTLLIARTPEITCVVVDLDPEDPEVQISWFVDGKEVHTAKTQPREEQFNSTYRVVSVLPIGHQDWLTGKEFKCKVNNKALPSPIERTISKARGQAHQPSVYVLPPSPKELSSSDTVTLTCLIKDFFPPEIDVEWQSNGQPEPESKYHTTAPQLDEDGSYFLYSKLSVDKSRWQQGDTFTCAVMHEALHNHYTDLSLSHSPGK

SEQ ID NO: 387 - protein, 220 aa, Artificial Sequence
  Synthetic: Exemplary variant canine IgG-B Fc (0Y0)   Protein A + C1q +  CD16 +   Q(82)Y (0Y0)
PAPEMLGGPSVFIFPPKPKDTLLIARTPEVTCVVVDLDPEDPEVQISWFVDGKQMQTAKTQPREEQFNGTYRVVSVLPIGHYDWLKGKQFTCKVNNKALPSPIERTISKARGQAHQPSVYVLPPSREELSKNTVSLTCLIKDFFPPDIDVEWQSNGQQEPESKYRTTPPQLDEDGSYFLYSKLSVDKSRWQRGDTFICAVMHEALHNHYTQESLSHSPGK

SEQ ID NO: 388 - protein, 220 aa, Artificial Sequence
  Synthetic: Exemplary variant canine IgG-B Fc (0YH)  Gln82Tyr Asn207His
PAPEMLGGPSVFIFPPKPKDTLLIARTPEVTCVVVDLDPEDPEVQISWFVDGKQMQTAKTQPREEQFNGTYRVVSVLPIGHYDWLKGKQFTCKVNNKALPSPIERTISKARGQAHQPSVYVLPPSREELSKNTVSLTCLIKDFFPPDIDVEWQSNGQQEPESKYRTTPPQLDEDGSYFLYSKLSVDKSRWQRGDTFICAVMHEALHHHYTQESLSHSPGK

SEQ ID NO: 389 - protein, 220 aa, Artificial Sequence
  Synthetic: Exemplary variant canine IgG-B Fc (0YY)  Gln82Tyr Asn207Tyr
PAPEMLGGPSVFIFPPKPKDTLLIARTPEVTCVVVDLDPEDPEVQISWFVDGKQMQTAKTQPREEQFNGTYRVVSVLPIGHYDWLKGKQFTCKVNNKALPSPIERTISKARGQAHQPSVYVLPPSREELSKNTVSLTCLIKDFFPPDIDVEWQSNGQQEPESKYRTTPPQLDEDGSYFLYSKLSVDKSRWQRGDTFICAVMHEALHYHYTQESLSHSPGK

SEQ ID NO: 390 - protein, 220 aa, Artificial Sequence
  Synthetic: Exemplary variant canine IgG-B Fc (00Y)  Asn207Tyr
PAPEMLGGPSVFIFPPKPKDTLLIARTPEVTCVVVDLDPEDPEVQISWFVDGKQMQTAKTQPREEQFNGTYRVVSVLPIGHQDWLKGKQFTCKVNNKALPSPIERTISKARGQAHQPSVYVLPPSREELSKNTVSLTCLIKDFFPPDIDVEWQSNGQQEPESKYRTTPPQLDEDGSYFLYSKLSVDKSRWQRGDTFICAVMHEALHYHYTQESLSHSPGK

SEQ ID NO: 391 - protein, 220 aa, Artificial Sequence
  Synthetic: Exemplary variant canine IgG-B Fc (YTE)  Leu23Tyr Ala25Thr Thr27Glu
PAPEMLGGPSVFIFPPKPKDTLYITREPEVTCVVVDLDPEDPEVQISWFVDGKQMQTAKTQPREEQFNGTYRVVSVLPIGHQDWLKGKQFTCKVNNKALPSPIERTISKARGQAHQPSVYVLPPSREELSKNTVSLTCLIKDFFPPDIDVEWQSNGQQEPESKYRTTPPQLDEDGSYFLYSKLSVDKSRWQRGDTFICAVMHEALHNHYTQESLSHSPGK

SEQ ID NO: 392 - protein, 220 aa, Artificial Sequence
  Synthetic: Exemplary variant canine IgG-B Fc  Protein A +  C1q - CD16 - K(93)R K(97)I A(98)G  L(23)F (F00)
PAPEMLGGPSVFIFPPKPKDTLFIARTPEVTCVVVDLDPEDPEVQISWFVDGKQMQTAKTQPREEQFNGTYRVVSVLPIGHQDWLKGKQFTCRVNNIGLPSPIERTISKARGQAHQPSVYVLPPSREELSKNTVSLTCLIKDFFPPDIDVEWQSNGQQEPESKYRTTPPQLDEDGSYFLYSKLSVDKSRWQRGDTFICAVMHEALHNHYTQESLSHSPGK

SEQ ID NO: 393 - protein, 220 aa, Artificial Sequence
  Synthetic: Exemplary variant canine IgG-B Fc  Protein A +  C1q - CD16 - K(93)R K(97)I A(98)G  L(23)Y (Y00)
PAPEMLGGPSVFIFPPKPKDTLYIARTPEVTCVVVDLDPEDPEVQISWFVDGKQMQTAKTQPREEQFNGTYRVVSVLPIGHQDWLKGKQFTCRVNNIGLPSPIERTISKARGQAHQPSVYVLPPSREELSKNTVSLTCLIKDFFPPDIDVEWQSNGQQEPESKYRTTPPQLDEDGSYFLYSKLSVDKSRWQRGDTFICAVMHEALHNHYTQESLSHSPGK

SEQ ID NO: 394 - protein, 220 aa, Artificial Sequence
  Synthetic: Exemplary variant canine IgG-B Fc  Protein A +  C1q - CD16 - K(93)R K(97)I A(98)G  Q(82)Y (0Y0)
PAPEMLGGPSVFIFPPKPKDTLLIARTPEVTCVVVDLDPEDPEVQISWFVDGKQMQTAKTQPREEQFNGTYRVVSVLPIGHYDWLKGKQFTCRVNNIGLPSPIERTISKARGQAHQPSVYVLPPSREELSKNTVSLTCLIKDFFPPDIDVEWQSNGQQEPESKYRTTPPQLDEDGSYFLYSKLSVDKSRWQRGDTFICAVMHEALHNHYTQESLSHSPGK

SEQ ID NO: 395 - protein, 451 aa, Artificial Sequence
  Synthetic: Caninized Clone I variable HC v1 and variant canine IgG-B C1q -, CD16 -, F00
EVQLVESGGDLVKPGGSLRLSCKASGYTFTSYVMHWVRQAPGQGLEWVAYINPNNDGTFYNGAVKGRFTISRDNARNTLYLQMNSLRSEDTAVYYCAAFYYGFAYWGQGTLVTVSSASTTAPSVFPLAPSCGSTSGSTVALACLVSGYFPEPVTVSWNSGSLTSGVHTFPSVLQSSGLYSLSSMVTVPSSRWPSETFTCNVAHPASKTKVDKPVPKRENGRVPRPPDCPKCPAPEMLGGPSVFIFPPKPKDTLFIARTPEVTCVVVDLDPEDPEVQISWFVDGKQMQTAKTQPREEQFNGTYRVVSVLPIGHQDWLKGKQFTCRVNNIGLPSPIERTISKARGQAHQPSVYVLPPSREELSKNTVSLTCLIKDFFPPDIDVEWQSNGQQEPESKYRTTPPQLDEDGSYFLYSKLSVDKSRWQRGDTFICAVMHEALHNHYTQESLSHSPGK

SEQ ID NO: 396 - protein, 451 aa, Artificial Sequence
  Synthetic: Caninized Clone I variable HC v2 and variant canine IgG-B C1q -, CD16 -, F00
EVQLVQSGAEVKKPGASVKVSCKASGYTFTSYVMHWVRQAPGQGLEWMGYINPNNDGTFYNGKFQGRVTLTADTSTSTAYMELSSLRAGDIAVYYCAAFYYGFAYWGQGTLVTVSSASTTAPSVFPLAPSCGSTSGSTVALACLVSGYFPEPVTVSWNSGSLTSGVHTFPSVLQSSGLYSLSSMVTVPSSRWPSETFTCNVAHPASKTKVDKPVPKRENGRVPRPPDCPKCPAPEMLGGPSVFIFPPKPKDTLFIARTPEVTCVVVDLDPEDPEVQISWFVDGKQMQTAKTQPREEQFNGTYRVVSVLPIGHQDWLKGKQFTCRVNNIGLPSPIERTISKARGQAHQPSVYVLPPSREELSKNTVSLTCLIKDFFPPDIDVEWQSNGQQEPESKYRTTPPQLDEDGSYFLYSKLSVDKSRWQRGDTFICAVMHEALHNHYTQESLSHSPGK

SEQ ID NO: 397 - protein, 451 aa, Artificial Sequence
  Synthetic: Caninized Clone I variable HC v3 and variant canine IgG-B C1q -, CD16 -, F00
EVQLVQSAAEVKKPGASVKVSCKASGYTFTSYVMHWVRQAPGQGLEWIGYINPNNDGTFYNGKFQGRVTLTADTSTGTTYTELSSLRAEDTAVYYCAAFYYGFAYWGQGTLVTVSSASTTAPSVFPLAPSCGSTSGSTVALACLVSGYFPEPVTVSWNSGSLTSGVHTFPSVLQSSGLYSLSSMVTVPSSRWPSETFTCNVAHPASKTKVDKPVPKRENGRVPRPPDCPKCPAPEMLGGPSVFIFPPKPKDTLFIARTPEVTCVVVDLDPEDPEVQISWFVDGKQMQTAKTQPREEQFNGTYRVVSVLPIGHQDWLKGKQFTCRVNNIGLPSPIERTISKARGQAHQPSVYVLPPSREELSKNTVSLTCLIKDFFPPDIDVEWQSNGQQEPESKYRTTPPQLDEDGSYFLYSKLSVDKSRWQRGDTFICAVMHEALHNHYTQESLSHSPGK

SEQ ID NO: 398 - protein, 451 aa, Artificial Sequence; identical to SEQ ID NO: 396
  Synthetic: Caninized Clone I variable HC v4 and variant canine IgG-B C1q -, CD16 -, F00

SEQ ID NO: 399 - protein, 451 aa, Artificial Sequence
  Synthetic: Caninized Clone I variable HC v1 and variant canine IgG-B C1q -, CD16 -, Y00
EVQLVESGGDLVKPGGSLRLSCKASGYTFTSYVMHWVRQAPGQGLEWVAYINPNNDGTFYNGAVKGRFTISRDNARNTLYLQMNSLRSEDTAVYYCAAFYYGFAYWGQGTLVTVSSASTTAPSVFPLAPSCGSTSGSTVALACLVSGYFPEPVTVSWNSGSLTSGVHTFPSVLQSSGLYSLSSMVTVPSSRWPSETFTCNVAHPASKTKVDKPVPKRENGRVPRPPDCPKCPAPEMLGGPSVFIFPPKPKDTLYIARTPEVTCVVVDLDPEDPEVQISWFVDGKQMQTAKTQPREEQFNGTYRVVSVLPIGHQDWLKGKQFTCRVNNIGLPSPIERTISKARGQAHQPSVYVLPPSREELSKNTVSLTCLIKDFFPPDIDVEWQSNGQQEPESKYRTTPPQLDEDGSYFLYSKLSVDKSRWQRGDTFICAVMHEALHNHYTQESLSHSPGK

SEQ ID NO: 400 - protein, 451 aa, Artificial Sequence
  Synthetic: Caninized Clone I variable HC v2 and variant canine IgG-B C1q -, CD16 -, Y00
EVQLVQSGAEVKKPGASVKVSCKASGYTFTSYVMHWVRQAPGQGLEWMGYINPNNDGTFYNGKFQGRVTLTADTSTSTAYMELSSLRAGDIAVYYCAAFYYGFAYWGQGTLVTVSSASTTAPSVFPLAPSCGSTSGSTVALACLVSGYFPEPVTVSWNSGSLTSGVHTFPSVLQSSGLYSLSSMVTVPSSRWPSETFTCNVAHPASKTKVDKPVPKRENGRVPRPPDCPKCPAPEMLGGPSVFIFPPKPKDTLYIARTPEVTCVVVDLDPEDPEVQISWFVDGKQMQTAKTQPREEQFNGTYRVVSVLPIGHQDWLKGKQFTCRVNNIGLPSPIERTISKARGQAHQPSVYVLPPSREELSKNTVSLTCLIKDFFPPDIDVEWQSNGQQEPESKYRTTPPQLDEDGSYFLYSKLSVDKSRWQRGDTFICAVMHEALHNHYTQESLSHSPGK

SEQ ID NO: 401 - protein, 451 aa, Artificial Sequence
  Synthetic: Caninized Clone I variable HC v3 and variant canine IgG-B C1q -, CD16 -, Y00
EVQLVQSAAEVKKPGASVKVSCKASGYTFTSYVMHWVRQAPGQGLEWIGYINPNNDGTFYNGKFQGRVTLTADTSTGTTYTELSSLRAEDTAVYYCAAFYYGFAYWGQGTLVTVSSASTTAPSVFPLAPSCGSTSGSTVALACLVSGYFPEPVTVSWNSGSLTSGVHTFPSVLQSSGLYSLSSMVTVPSSRWPSETFTCNVAHPASKTKVDKPVPKRENGRVPRPPDCPKCPAPEMLGGPSVFIFPPKPKDTLYIARTPEVTCVVVDLDPEDPEVQISWFVDGKQMQTAKTQPREEQFNGTYRVVSVLPIGHQDWLKGKQFTCRVNNIGLPSPIERTISKARGQAHQPSVYVLPPSREELSKNTVSLTCLIKDFFPPDIDVEWQSNGQQEPESKYRTTPPQLDEDGSYFLYSKLSVDKSRWQRGDTFICAVMHEALHNHYTQESLSHSPGK

SEQ ID NO: 402 - protein, 451 aa, Artificial Sequence; identical to SEQ ID NO: 400
  Synthetic: Caninized Clone I variable HC v4 and variant canine IgG-B C1q -, CD16 -, Y00

SEQ ID NO: 403 - protein, 451 aa, Artificial Sequence
  Synthetic: Caninized Clone I variable HC v1 and variant canine IgG-B C1q -, CD16 -, 0Y0
EVQLVESGGDLVKPGGSLRLSCKASGYTFTSYVMHWVRQAPGQGLEWVAYINPNNDGTFYNGAVKGRFTISRDNARNTLYLQMNSLRSEDTAVYYCAAFYYGFAYWGQGTLVTVSSASTTAPSVFPLAPSCGSTSGSTVALACLVSGYFPEPVTVSWNSGSLTSGVHTFPSVLQSSGLYSLSSMVTVPSSRWPSETFTCNVAHPASKTKVDKPVPKRENGRVPRPPDCPKCPAPEMLGGPSVFIFPPKPKDTLLIARTPEVTCVVVDLDPEDPEVQISWFVDGKQMQTAKTQPREEQFNGTYRVVSVLPIGHYDWLKGKQFTCRVNNIGLPSPIERTISKARGQAHQPSVYVLPPSREELSKNTVSLTCLIKDFFPPDIDVEWQSNGQQEPESKYRTTPPQLDEDGSYFLYSKLSVDKSRWQRGDTFICAVMHEALHNHYTQESLSHSPGK

SEQ ID NO: 404 - protein, 451 aa, Artificial Sequence
  Synthetic: Caninized Clone I variable HC v2 and variant canine IgG-B C1q -, CD16 -, 0Y0
EVQLVQSGAEVKKPGASVKVSCKASGYTFTSYVMHWVRQAPGQGLEWMGYINPNNDGTFYNGKFQGRVTLTADTSTSTAYMELSSLRAGDIAVYYCAAFYYGFAYWGQGTLVTVSSASTTAPSVFPLAPSCGSTSGSTVALACLVSGYFPEPVTVSWNSGSLTSGVHTFPSVLQSSGLYSLSSMVTVPSSRWPSETFTCNVAHPASKTKVDKPVPKRENGRVPRPPDCPKCPAPEMLGGPSVFIFPPKPKDTLLIARTPEVTCVVVDLDPEDPEVQISWFVDGKQMQTAKTQPREEQFNGTYRVVSVLPIGHYDWLKGKQFTCRVNNIGLPSPIERTISKARGQAHQPSVYVLPPSREELSKNTVSLTCLIKDFFPPDIDVEWQSNGQQEPESKYRTTPPQLDEDGSYFLYSKLSVDKSRWQRGDTFICAVMHEALHNHYTQESLSHSPGK

SEQ ID NO: 405 - protein, 451 aa, Artificial Sequence
  Synthetic: Caninized Clone I variable HC v3 and variant canine IgG-B C1q -, CD16 -, 0Y0
EVQLVQSAAEVKKPGASVKVSCKASGYTFTSYVMHWVRQAPGQGLEWIGYINPNNDGTFYNGKFQGRVTLTADTSTGTTYTELSSLRAEDTAVYYCAAFYYGFAYWGQGTLVTVSSASTTAPSVFPLAPSCGSTSGSTVALACLVSGYFPEPVTVSWNSGSLTSGVHTFPSVLQSSGLYSLSSMVTVPSSRWPSETFTCNVAHPASKTKVDKPVPKRENGRVPRPPDCPKCPAPEMLGGPSVFIFPPKPKDTLLIARTPEVTCVVVDLDPEDPEVQISWFVDGKQMQTAKTQPREEQFNGTYRVVSVLPIGHYDWLKGKQFTCRVNNIGLPSPIERTISKARGQAHQPSVYVLPPSREELSKNTVSLTCLIKDFFPPDIDVEWQSNGQQEPESKYRTTPPQLDEDGSYFLYSKLSVDKSRWQRGDTFICAVMHEALHNHYTQESLSHSPGK

SEQ ID NO: 406 - protein, 451 aa, Artificial Sequence; identical to SEQ ID NO: 404
  Synthetic: Caninized Clone I variable HC v4 and variant canine IgG-B C1q -, CD16 -, 0Y0

SEQ ID NO: 407 - protein, 12 aa, Artificial Sequence
  Synthetic: Alternative M9 CDR-H1
ASGFTFSSFGMH

SEQ ID NO: 408 - protein, 107 aa, Artificial Sequence
  Synthetic: Caninized Clone M9 variable LC v2
DIVMTQTPLSLSVSPGEPASISCSASSSVSSNYLHWYLQKAGQSPRLLIYRTSNLPSGVPDRFSGSGSGTDFTLRISRVEAEDAGIYYCQQGSGMLTFGQGTKLEIK

SEQ ID NO: 409 - protein, 217 aa, Artificial Sequence
  Synthetic: Caninized Clone M9 variable LC v2 and canine ? light constant region
DIVMTQTPLSLSVSPGEPASISCSASSSVSSNYLHWYLQKAGQSPRLLIYRTSNLPSGVPDRFSGSGSGTDFTLRISRVEAEDAGIYYCQQGSGMLTFGQGTKLEIKRNDAQPAVYLFQPSPDQLHTGSASVVCLLNSFYPKDINVKWKVDGVIQDTGIQESVTEQDKDSTYSLSSTLTMSSTEYLSHELYSCEITHKSLPSTLIKSFQRSECQRVD

SEQ ID NO: 410 - protein, 452 aa, Artificial Sequence
  Synthetic: Caninized Clone M3 variable HC v1 and variant canine IgG-B  C1q -, CD16 -, F00
EVQLVESGGDLVKPAGSLRLSCTVSGFSLSRYSVHWVRQAPGKGLEWLGMIWGGGSTDYNSVVKGRFTISRDNAKNTVYLQMNSLRAEDTAMYYCARTYRGYALDYWGQGTLVTVSSASTTAPSVFPLAPSCGSTSGSTVALACLVSGYFPEPVTVSWNSGSLTSGVHTFPSVLQSSGLYSLSSMVTVPSSRWPSETFTCNVAHPASKTKVDKPVPKRENGRVPRPPDCPKCPAPEMLGGPSVFIFPPKPKDTLFIARTPEVTCVVVDLDPEDPEVQISWFVDGKQMQTAKTQPREEQFNGTYRVVSVLPIGHQDWLKGKQFTCRVNNIGLPSPIERTISKARGQAHQPSVYVLPPSREELSKNTVSLTCLIKDFFPPDIDVEWQSNGQQEPESKYRTTPPQLDEDGSYFLYSKLSVDKSRWQRGDTFICAVMHEALHNHYTQESLSHSPGK

SEQ ID NO: 411 - protein, 452 aa, Artificial Sequence
  Synthetic: Caninized Clone M3 variable HC v2 and variant canine IgG-B  C1q -, CD16 -, F00
ELTLQESGPGLVKPSQTLSLTCTVSGFSLSRYSVHWIRQPRGRGLELLGMIWGGGSTDYNPAFQGRISITADTAKNQFSLQLSSMTTEDTAVYYCARTYRGYALDYWGQGTLVTVSSASTTAPSVFPLAPSCGSTSGSTVALACLVSGYFPEPVTVSWNSGSLTSGVHTFPSVLQSSGLYSLSSMVTVPSSRWPSETFTCNVAHPASKTKVDKPVPKRENGRVPRPPDCPKCPAPEMLGGPSVFIFPPKPKDTLFIARTPEVTCVVVDLDPEDPEVQISWFVDGKQMQTAKTQPREEQFNGTYRVVSVLPIGHQDWLKGKQFTCRVNNIGLPSPIERTISKARGQAHQPSVYVLPPSREELSKNTVSLTCLIKDFFPPDIDVEWQSNGQQEPESKYRTTPPQLDEDGSYFLYSKLSVDKSRWQRGDTFICAVMHEALHNHYTQESLSHSPGK

SEQ ID NO: 412 - protein, 455 aa, Artificial Sequence
  Synthetic: Caninized Clone M9 variable HC v1 and variant canine IgG-B  C1q -, CD16 -, F00
EVQLVESGGDLVKPGGSLRLSCAASGFTFSSFGMHWVRQAPGKGLEWVAYIRSDSSTIYYADAVKGRFTISRDNAKNTLYLQMNSLRAEDTAMYYCARSGYYGSFSLTYWGQGTLVTVSSASTTAPSVFPLAPSCGSTSGSTVALACLVSGYFPEPVTVSWNSGSLTSGVHTFPSVLQSSGLYSLSSMVTVPSSRWPSETFTCNVAHPASKTKVDKPVPKRENGRVPRPPDCPKCPAPEMLGGPSVFIFPPKPKDTLFIARTPEVTCVVVDLDPEDPEVQISWFVDGKQMQTAKTQPREEQFNGTYRVVSVLPIGHQDWLKGKQFTCRVNNIGLPSPIERTISKARGQAHQPSVYVLPPSREELSKNTVSLTCLIKDFFPPDIDVEWQSNGQQEPESKYRTTPPQLDEDGSYFLYSKLSVDKSRWQRGDTFICAVMHEALHNHYTQESLSHSPGK

SEQ ID NO: 413 - protein, 455 aa, Artificial Sequence
  Synthetic: Caninized Clone M9 variable HC v2 and variant canine IgG-B  C1q -, CD16 -, F00
EVQLVESGGDLVKPGGSLRLSCVASGFTFSSFGMHWVRQAPGKGLQWVAYIRSDSSTIYYADAVKGRFTISRDNAKNTLYLQMNSLRAEDTAMYYCARSGYYGSFSLTYWGQGTLVTVSSASTTAPSVFPLAPSCGSTSGSTVALACLVSGYFPEPVTVSWNSGSLTSGVHTFPSVLQSSGLYSLSSMVTVPSSRWPSETFTCNVAHPASKTKVDKPVPKRENGRVPRPPDCPKCPAPEMLGGPSVFIFPPKPKDTLFIARTPEVTCVVVDLDPEDPEVQISWFVDGKQMQTAKTQPREEQFNGTYRVVSVLPIGHQDWLKGKQFTCRVNNIGLPSPIERTISKARGQAHQPSVYVLPPSREELSKNTVSLTCLIKDFFPPDIDVEWQSNGQQEPESKYRTTPPQLDEDGSYFLYSKLSVDKSRWQRGDTFICAVMHEALHNHYTQESLSHSPGK

SEQ ID NO: 414 - protein, 452 aa, Artificial Sequence
  Synthetic: Caninized Clone M3 variable HC v1 and variant canine IgG-B C1q -, CD16 -, Y00
EVQLVESGGDLVKPAGSLRLSCTVSGFSLSRYSVHWVRQAPGKGLEWLGMIWGGGSTDYNSVVKGRFTISRDNAKNTVYLQMNSLRAEDTAMYYCARTYRGYALDYWGQGTLVTVSSASTTAPSVFPLAPSCGSTSGSTVALACLVSGYFPEPVTVSWNSGSLTSGVHTFPSVLQSSGLYSLSSMVTVPSSRWPSETFTCNVAHPASKTKVDKPVPKRENGRVPRPPDCPKCPAPEMLGGPSVFIFPPKPKDTLYIARTPEVTCVVVDLDPEDPEVQISWFVDGKQMQTAKTQPREEQFNGTYRVVSVLPIGHQDWLKGKQFTCRVNNIGLPSPIERTISKARGQAHQPSVYVLPPSREELSKNTVSLTCLIKDFFPPDIDVEWQSNGQQEPESKYRTTPPQLDEDGSYFLYSKLSVDKSRWQRGDTFICAVMHEALHNHYTQESLSHSPGK

SEQ ID NO: 415 - protein, 452 aa, Artificial Sequence
  Synthetic: Caninized Clone M3 variable HC v2 and variant canine IgG-B C1q -, CD16 -, Y00
ELTLQESGPGLVKPSQTLSLTCTVSGFSLSRYSVHWIRQPRGRGLELLGMIWGGGSTDYNPAFQGRISITADTAKNQFSLQLSSMTTEDTAVYYCARTYRGYALDYWGQGTLVTVSSASTTAPSVFPLAPSCGSTSGSTVALACLVSGYFPEPVTVSWNSGSLTSGVHTFPSVLQSSGLYSLSSMVTVPSSRWPSETFTCNVAHPASKTKVDKPVPKRENGRVPRPPDCPKCPAPEMLGGPSVFIFPPKPKDTLYIARTPEVTCVVVDLDPEDPEVQISWFVDGKQMQTAKTQPREEQFNGTYRVVSVLPIGHQDWLKGKQFTCRVNNIGLPSPIERTISKARGQAHQPSVYVLPPSREELSKNTVSLTCLIKDFFPPDIDVEWQSNGQQEPESKYRTTPPQLDEDGSYFLYSKLSVDKSRWQRGDTFICAVMHEALHNHYTQESLSHSPGK

SEQ ID NO: 416 - protein, 455 aa, Artificial Sequence
  Synthetic: Caninized Clone M9 variable HC v1 and variant canine IgG-B C1q -, CD16 -, Y00
EVQLVESGGDLVKPGGSLRLSCAASGFTFSSFGMHWVRQAPGKGLEWVAYIRSDSSTIYYADAVKGRFTISRDNAKNTLYLQMNSLRAEDTAMYYCARSGYYGSFSLTYWGQGTLVTVSSASTTAPSVFPLAPSCGSTSGSTVALACLVSGYFPEPVTVSWNSGSLTSGVHTFPSVLQSSGLYSLSSMVTVPSSRWPSETFTCNVAHPASKTKVDKPVPKRENGRVPRPPDCPKCPAPEMLGGPSVFIFPPKPKDTLYIARTPEVTCVVVDLDPEDPEVQISWFVDGKQMQTAKTQPREEQFNGTYRVVSVLPIGHQDWLKGKQFTCRVNNIGLPSPIERTISKARGQAHQPSVYVLPPSREELSKNTVSLTCLIKDFFPPDIDVEWQSNGQQEPESKYRTTPPQLDEDGSYFLYSKLSVDKSRWQRGDTFICAVMHEALHNHYTQESLSHSPGK

SEQ ID NO: 417 - protein, 455 aa, Artificial Sequence
  Synthetic: Caninized Clone M9 variable HC v2 and variant canine IgG-B C1q -, CD16 -, Y00
EVQLVESGGDLVKPGGSLRLSCVASGFTFSSFGMHWVRQAPGKGLQWVAYIRSDSSTIYYADAVKGRFTISRDNAKNTLYLQMNSLRAEDTAMYYCARSGYYGSFSLTYWGQGTLVTVSSASTTAPSVFPLAPSCGSTSGSTVALACLVSGYFPEPVTVSWNSGSLTSGVHTFPSVLQSSGLYSLSSMVTVPSSRWPSETFTCNVAHPASKTKVDKPVPKRENGRVPRPPDCPKCPAPEMLGGPSVFIFPPKPKDTLYIARTPEVTCVVVDLDPEDPEVQISWFVDGKQMQTAKTQPREEQFNGTYRVVSVLPIGHQDWLKGKQFTCRVNNIGLPSPIERTISKARGQAHQPSVYVLPPSREELSKNTVSLTCLIKDFFPPDIDVEWQSNGQQEPESKYRTTPPQLDEDGSYFLYSKLSVDKSRWQRGDTFICAVMHEALHNHYTQESLSHSPGK

SEQ ID NO: 418 - protein, 452 aa, Artificial Sequence
  Synthetic: Caninized Clone M3 variable HC v1 and variant canine IgG-B C1q -, CD16 -, 0Y0
EVQLVESGGDLVKPAGSLRLSCTVSGFSLSRYSVHWVRQAPGKGLEWLGMIWGGGSTDYNSVVKGRFTISRDNAKNTVYLQMNSLRAEDTAMYYCARTYRGYALDYWGQGTLVTVSSASTTAPSVFPLAPSCGSTSGSTVALACLVSGYFPEPVTVSWNSGSLTSGVHTFPSVLQSSGLYSLSSMVTVPSSRWPSETFTCNVAHPASKTKVDKPVPKRENGRVPRPPDCPKCPAPEMLGGPSVFIFPPKPKDTLLIARTPEVTCVVVDLDPEDPEVQISWFVDGKQMQTAKTQPREEQFNGTYRVVSVLPIGHYDWLKGKQFTCRVNNIGLPSPIERTISKARGQAHQPSVYVLPPSREELSKNTVSLTCLIKDFFPPDIDVEWQSNGQQEPESKYRTTPPQLDEDGSYFLYSKLSVDKSRWQRGDTFICAVMHEALHNHYTQESLSHSPGK

SEQ ID NO: 419 - protein, 452 aa, Artificial Sequence
  Synthetic: Caninized Clone M3 variable HC v2 and variant canine IgG-B C1q -, CD16 -, 0Y0
ELTLQESGPGLVKPSQTLSLTCTVSGFSLSRYSVHWIRQPRGRGLELLGMIWGGGSTDYNPAFQGRISITADTAKNQFSLQLSSMTTEDTAVYYCARTYRGYALDYWGQGTLVTVSSASTTAPSVFPLAPSCGSTSGSTVALACLVSGYFPEPVTVSWNSGSLTSGVHTFPSVLQSSGLYSLSSMVTVPSSRWPSETFTCNVAHPASKTKVDKPVPKRENGRVPRPPDCPKCPAPEMLGGPSVFIFPPKPKDTLLIARTPEVTCVVVDLDPEDPEVQISWFVDGKQMQTAKTQPREEQFNGTYRVVSVLPIGHYDWLKGKQFTCRVNNIGLPSPIERTISKARGQAHQPSVYVLPPSREELSKNTVSLTCLIKDFFPPDIDVEWQSNGQQEPESKYRTTPPQLDEDGSYFLYSKLSVDKSRWQRGDTFICAVMHEALHNHYTQESLSHSPGK

SEQ ID NO: 420 - protein, 455 aa, Artificial Sequence
  Synthetic: Caninized Clone M9 variable HC v1 and variant canine IgG-B C1q -, CD16 -, 0Y0
EVQLVESGGDLVKPGGSLRLSCAASGFTFSSFGMHWVRQAPGKGLEWVAYIRSDSSTIYYADAVKGRFTISRDNAKNTLYLQMNSLRAEDTAMYYCARSGYYGSFSLTYWGQGTLVTVSSASTTAPSVFPLAPSCGSTSGSTVALACLVSGYFPEPVTVSWNSGSLTSGVHTFPSVLQSSGLYSLSSMVTVPSSRWPSETFTCNVAHPASKTKVDKPVPKRENGRVPRPPDCPKCPAPEMLGGPSVFIFPPKPKDTLLIARTPEVTCVVVDLDPEDPEVQISWFVDGKQMQTAKTQPREEQFNGTYRVVSVLPIGHYDWLKGKQFTCRVNNIGLPSPIERTISKARGQAHQPSVYVLPPSREELSKNTVSLTCLIKDFFPPDIDVEWQSNGQQEPESKYRTTPPQLDEDGSYFLYSKLSVDKSRWQRGDTFICAVMHEALHNHYTQESLSHSPGK

SEQ ID NO: 421 - protein, 455 aa, Artificial Sequence
  Synthetic: Caninized Clone M9 variable HC v2 and variant canine IgG-B C1q -, CD16 -, 0Y0
EVQLVESGGDLVKPGGSLRLSCVASGFTFSSFGMHWVRQAPGKGLQWVAYIRSDSSTIYYADAVKGRFTISRDNAKNTLYLQMNSLRAEDTAMYYCARSGYYGSFSLTYWGQGTLVTVSSASTTAPSVFPLAPSCGSTSGSTVALACLVSGYFPEPVTVSWNSGSLTSGVHTFPSVLQSSGLYSLSSMVTVPSSRWPSETFTCNVAHPASKTKVDKPVPKRENGRVPRPPDCPKCPAPEMLGGPSVFIFPPKPKDTLLIARTPEVTCVVVDLDPEDPEVQISWFVDGKQMQTAKTQPREEQFNGTYRVVSVLPIGHYDWLKGKQFTCRVNNIGLPSPIERTISKARGQAHQPSVYVLPPSREELSKNTVSLTCLIKDFFPPDIDVEWQSNGQQEPESKYRTTPPQLDEDGSYFLYSKLSVDKSRWQRGDTFICAVMHEALHNHYTQESLSHSPGK
